(19) United States
(12) Patent Application Publication
(10) Pub. No.: US 2023/0279428 A1
(43) Pub. Date: Sep. 7, 2023

(54) ADENOVIRUS VECTORS AND METHODS FOR USING ADENOVIRUS VECTORS

(71) Applicant: Mayo Foundation for Medical Education and Research, Rochester, MN (US)

(72) Inventor: Michael A. Barry, Rochester, MN (US)

(21) Appl. No.: 18/017,955

(22) PCT Filed: Aug. 17, 2021
(86) PCT No.: PCT/US2021/046333

§ 371 Date: Jan. 25, 2023

Related U.S. Application Data
(63) Continuation of application No. 16/996,740, filed on Aug. 18, 2020, now Pat. No. 11,149,286.
(60) Provisional application No. 63/066,740, filed on Aug. 17, 2020.

(51) Int. Cl. C12N 15/86; C12N 7/00; C07K 14/005; A61P 31/04; A61P 37/04; A61P 31/14; A61K 9/00; A61K 39/12; A61K 39/08

(52) U.S. Cl. CPC C12N 15/86; C12N 7/00; C07K 14/005; A61P 31/04; A61P 37/04; A61P 31/14; A61K 9/006; A61K 39/12; A61K 39/08; C12N 2770/20022; C12N 2750/14122; A61K 2039/541

(57) ABSTRACT

This document provides adenovirus vectors and methods and materials related to using adenovirus vectors. For example, adenoviruses for delivering nucleic acid encoding one or more immunogens (e.g., one or more immunogens associated with a pathogen causing an infection) to cells within a mammal such that the mammal produces an effective immune response against the immunogen(s) are provided.

### CROSS-REFERENCE TO RELATED APPLICATIONS

[0001] This application claims priority to U.S. application Ser. No. 16/996,740, filed Aug. 18, 2020, which claims the benefit of U.S. Provisional Application Ser. No. 63/066,740, filed Aug. 17, 2020. The disclosures of the prior applications are considered part of (and are incorporated by reference in) the disclosure of this application.

### SEQUENCE LISTING

[0002] This document includes a sequence listing submitted to the United States Patent and Trademark Office via the electronic filing system as an ASCII text file. The sequence listing, which is incorporated-by-reference herein, is titled “07039-1964WO1_ST25.txt,” was created on Aug. 6, 2021, and has a size of 892 kilobytes.

### TECHNICAL FIELD

[0003] This document relates to adenovirus vectors and methods and materials related to using adenovirus vectors. For example, adenovirus vectors can be used to deliver one or more immunogens (e.g., one or more immunogens associated with a pathogen causing an infection) to cells within a mammal such that the mammal produces an effective immune response against the immunogen(s).

### BACKGROUND INFORMATION

[0004] An infectious disease caused by a coronavirus known as COVID-19 was first reported to the World Health Organization (WHO) Country Office in China on Dec. 31, 2019. As of Jun. 3, 2020, approximately 6,287,771 confirmed cases of COVID-19, including 379,941 deaths, have been reported to the WHO (covid19.who.int/).

### SUMMARY

[0005] This document relates to adenovirus vectors and methods and materials related to using adenovirus vectors. For example, this document provides adenovirus vectors, nucleic acid molecules encoding adenovirus vectors, cell lines containing adenovirus vectors, and methods for using adenovirus vectors to deliver nucleic acid to cells in vitro or in vivo. This document also provides methods and materials for using adenovirus vectors to induce immune responses within a mammal (e.g., a human). In some cases, adenovirus vectors (e.g., single-cycle adenovirus (SC-Ad) vectors) can be used to deliver one or more (e.g., one, two, three, four, five, six, seven, eight, nine, ten, or more) immunogens that trigger an immune response within a mammal (e.g., a human).

[0006] As demonstrated herein, SC-Ads can be engineered to express one or more immunogens as fused and secreted polypeptides that can induce an effective immune response against those immunogens. For example, administration of SC-Ads expressing C. difficile TcdA/B fusion polypeptides protected mice and Syrian Hamsters from lethal toxin challenge for extended periods (e.g., over 36 weeks) after a single immunization.

[0007] Having the ability to produce immune responses effectively against viral and/or bacterial pathogens (e.g., a coronavirus) in mammals (e.g., humans) can improve survival and minimize the impact of the infection. Adenovirus vectors encoding one or more immunogens can be used to provide a mammal with sustained, long-term immunity against an infectious pathogen (e.g., a coronavirus). For example, adenovirus vectors encoding one or more immunogens associated with COVID-19 (e.g., one or more immunogens derived from SARS-CoV-2) can be used as a robust vaccine in the COVID-19 pandemic to generate humoral immunity against both primary infections and recurrences.

[0008] In general, one aspect of this document features a SC-Ad, where the SC-Ad has a genome lacking at least a portion of a nucleic acid sequence that encodes an adenovirus polypeptide, where the SC-Ad includes the adenovirus polypeptide, and where the SC-Ad includes a nucleic acid sequence encoding a coronavirus immunogen. The adenovirus polypeptide can be a fiber polypeptide, a V polypeptide, a hexon polypeptide, a penton base polypeptide, or a pIIIa polypeptide. The coronavirus immunogen can include a coronavirus Spike polypeptide or an immunogenic fragment thereof. The coronavirus immunogen can consist of or can consist essentially of an amino acid sequence set forth in any one of SEQ ID NOs:1-4. The SC-Ad also can include a nucleic acid sequence encoding an adjuvant polypeptide. The adjuvant polypeptide can be a granulocyte-macrophage colony-stimulating factor (GM-CSF) polypeptide, an interleukin 4 (IL-4) polypeptide, an interleukin 21 (IL-21) polypeptide, a CD40 ligand (CD40L) polypeptide, a 4-1BB ligand (4-1BBL) polypeptide, a transforming growth factor beta (TGF-β) polypeptide, a Clostridium domicile TcdA polypeptide, a C. difficile TcdB polypeptide, or a biologically active fragment thereof. The coronavirus Spike polypeptide can be fused to the adjuvant polypeptide. The coronavirus Spike polypeptide fused to the adjuvant polypeptide can consist essentially of or can consist of an amino acid sequence set forth in SEQ ID NO:5. The SC-Ad also can include a nucleic acid sequence encoding a chaff polypeptide. The chaff polypeptide can be a fragment of an ACE2 polypeptide. The fragment of an ACE2 polypeptide can include the extracellular region of an ACE2 polypeptide and can lack a transmembrane domain. The chaff polypeptide can consist essentially of or can consist of an amino acid sequence set forth in SEQ ID NO:8 or SEQ ID NO:9. The coronavirus Spike polypeptide can be fused to the chaff polypeptide.

[0009] In another aspect, this document features a composition including a SC-Ad, where the SC-Ad has a genome lacking at least a portion of a nucleic acid sequence that encodes an adenovirus polypeptide, where the SC-Ad includes the adenovirus polypeptide, and where the SC-Ad includes a nucleic acid sequence encoding a coronavirus immunogen.

[0010] In another aspect, this document features methods for inducing an immune response against a coronavirus in a mammal. The methods can include, or consist essentially of, administering to a mammal i) a SC-Ad, where the SC-Ad has a genome lacking at least a portion of a nucleic acid sequence that encodes an adenovirus polypeptide, where the SC-Ad includes the adenovirus polypeptide, and where the SC-Ad includes a nucleic acid sequence encoding a coronavirus immunogen; or ii) a composition including a SC-Ad, where the SC-Ad has a genome lacking at least a portion of a nucleic acid sequence that encodes an adenovirus polypeptide, where the SC-Ad includes the adenovirus polypeptide, and where the SC-Ad includes a nucleic acid sequence encoding a coronavirus immunogen, under conditions where the SC-Ad infects a cell of the mammal, and where expression of the immunogen in the cell leads to induction of the immune response. The mammal can be a human. The coronavirus can be a betacoronavirus. The betacoronavirus can be SARS-CoV-2. The administering can include mucosal delivery of the SC-Ad.

[0011] In another aspect, this document features a SC-Ad, where the SC-Ad has a genome lacking at least a portion of a nucleic acid sequence that encodes an adenovirus polypeptide, where the SC-Ad includes the adenovirus polypeptide, and where the SC-Ad includes (a) a nucleic acid sequence encoding an immunogen and (b) a nucleic acid sequence encoding an adjuvant polypeptide. The adenovirus polypeptide can be a fiber polypeptide, a V polypeptide, a hexon polypeptide, a penton base polypeptide, or a pIIIa polypeptide. The immunogen can be a coronavirus immunogen. The coronavirus immunogen can include a coronavirus Spike polypeptide or an immunogenic fragment thereof. The coronavirus immunogen can consist of or can consist essentially of an amino acid sequence set forth in any one of SEQ ID NOs:1-4. The adjuvant polypeptide can be a GM-CSF polypeptide, an IL-4 polypeptide, an IL-21 polypeptide, a CD40L polypeptide, a 4-1BBL polypeptide, a TGF-β polypeptide, a Clostridium difficile TcdA polypeptide, a C. difficile TcdB polypeptide, or a biologically active fragment thereof. The coronavirus Spike polypeptide can be fused to the adjuvant polypeptide. The coronavirus Spike polypeptide fused to the adjuvant polypeptide can consist essentially of or can consist of an amino acid sequence set forth in SEQ ID NO:5. The SC-Ad also can include a nucleic acid sequence encoding a chaff polypeptide. The chaff polypeptide can be a fragment of an ACE2 polypeptide. The fragment of an ACE2 polypeptide can include the extracellular region of an ACE2 polypeptide and can lack a transmembrane domain. The chaff polypeptide can consist essentially of or can consist of an amino acid sequence set forth in SEQ ID NO:8 or SEQ ID NO:9.

[0012] In another aspect, this document features a composition including a SC-Ad, where the SC-Ad has a genome lacking at least a portion of a nucleic acid sequence that encodes an adenovirus polypeptide, where the SC-Ad includes the adenovirus polypeptide, and where the SC-Ad includes (a) a nucleic acid sequence encoding an immunogen and (b) a nucleic acid sequence encoding an adjuvant polypeptide.

[0013] In another aspect, this document features methods for inducing an immune response against a virus in a mammal. The methods can include, or consist essentially of, administering to a mammal i) a SC-Ad, where the SC-Ad has a genome lacking at least a portion of a nucleic acid sequence that encodes an adenovirus polypeptide, where the SC-Ad includes the adenovirus polypeptide, and where the SC-Ad includes (a) a nucleic acid sequence encoding an immunogen and (b) a nucleic acid sequence encoding an adjuvant polypeptide; or ii) a composition that includes a SC-Ad, where the SC-Ad has a genome lacking at least a portion of a nucleic acid sequence that encodes an adenovirus polypeptide, where the SC-Ad includes the adenovirus polypeptide, and where the SC-Ad includes (a) a nucleic acid sequence encoding an immunogen and (b) a nucleic acid sequence encoding an adjuvant polypeptide, under conditions where the SC-Ad infects a cell of the mammal, and where expression of the immunogen in the cell leads to induction of the immune response. The mammal can be a human. The virus can be a coronavirus, and the immunogen can be associated with the coronavirus. The coronavirus can be a betacoronavirus. The betacoronavirus can be SARS-CoV-2. The administering can include mucosal delivery of the SC-Ad.

[0014] In another aspect, this document features a SC-Ad, where the SC-Ad has a genome which lacks at least a portion of a nucleic acid sequence that encodes an adenovirus polypeptide, where the SC-Ad includes the adenovirus polypeptide, and where the SC-Ad includes (a) a nucleic acid sequence encoding an immunogen and (b) a nucleic acid sequence encoding a chaff polypeptide. The adenovirus polypeptide can be a fiber polypeptide, a V polypeptide, a hexon polypeptide, a penton base polypeptide, or a pIIIa polypeptide. The immunogen can be a coronavirus immunogen. The coronavirus immunogen can include a coronavirus Spike polypeptide or an immunogenic fragment thereof. The coronavirus immunogen can consist of or can consist essentially of an amino acid sequence set forth in any one of SEQ ID NOs:1-4. The chaff polypeptide can be a fragment of an ACE2 polypeptide. The fragment of an ACE2 polypeptide can include the extracellular region of an ACE2 polypeptide and can lack a transmembrane domain. The chaff polypeptide can consist essentially of or can consist of an amino acid sequence set forth in SEQ ID NO:8 or SEQ ID NO:9. The coronavirus Spike polypeptide can be fused to the chaff polypeptide. The SC-Ad also can include a nucleic acid sequence encoding an adjuvant polypeptide. The adjuvant polypeptide can be a GM-CSF polypeptide, an IL-4 polypeptide, an IL-21 polypeptide, a CD40L polypeptide, a 4-1BBL polypeptide, a TGF-β polypeptide, a Clostridium difficile TcdA polypeptide, a C. difficile TcdB polypeptide, or a biologically active fragment thereof.

[0015] In another aspect, this document features for a composition including a SC-Ad, where the SC-Ad has a genome which lacks at least a portion of a nucleic acid sequence that encodes an adenovirus polypeptide, where the SC-Ad includes the adenovirus polypeptide, and where the SC-Ad includes (a) a nucleic acid sequence encoding an immunogen and (b) a nucleic acid sequence encoding a chaff polypeptide.

[0016] In another aspect, this document features methods for inducing an immune response against a virus in a mammal. The methods can include, or consist essentially of, administering to a mammal i) a SC-Ad, where the SC-Ad has a genome which lacks at least a portion of a nucleic acid sequence that encodes an adenovirus polypeptide, where the SC-Ad includes the adenovirus polypeptide, and where the SC-Ad includes (a) a nucleic acid sequence encoding an immunogen and (b) a nucleic acid sequence encoding a chaff polypeptide, or ii) a composition including a SC-Ad, where the SC-Ad has a genome which lacks at least a portion of a nucleic acid sequence that encodes an adenovirus polypeptide, where the SC-Ad includes the adenovirus polypeptide, and where the SC-Ad includes (a) a nucleic acid sequence encoding an immunogen and (b) a nucleic acid sequence encoding a chaff polypeptide, under conditions where the SC-Ad infects a cell of the mammal, and where expression of the immunogen in the cell leads to induction of the immune response. The mammal can be a human. The virus can be a coronavirus, and the immunogen can be associated with the coronavirus. The coronavirus can be a betacoronavirus. The betacoronavirus can be SARS-CoV-2. The administering can include mucosal delivery of the SC-Ad.

[0017] In another aspect, this document features for a SC-Ad, where the SC-Ad has a genome which lacks at least a portion of a nucleic acid sequence that encodes an adenovirus polypeptide, where the SC-Ad includes the adenovirus polypeptide, and where the SC-Ad includes (a) a nucleic acid sequence encoding an immunogen, (b) a nucleic acid sequence encoding an adjuvant polypeptide, and (c) a nucleic acid sequence encoding a chaff polypeptide. The adenovirus polypeptide can be a fiber polypeptide, a V polypeptide, a hexon polypeptide, a penton base polypeptide, or a pIIIa polypeptide. The immunogen can be a coronavirus immunogen. The coronavirus immunogen can include a coronavirus Spike polypeptide or an immunogenic fragment thereof. The coronavirus immunogen can consist of or can consist essentially of an amino acid sequence set forth in any one of SEQ ID NOs:1-4. The adjuvant polypeptide can be a GM-CSF polypeptide, an IL-4 polypeptide, an IL-21 polypeptide, a CD40L polypeptide, a 4-1BBL polypeptide, a TGF-β polypeptide, a Clostridium difficile TcdA polypeptide, a C. difficile TcdB polypeptide, or a biologically active fragment thereof. The chaff polypeptide can be a fragment of an ACE2 polypeptide. The fragment of an ACE2 polypeptide can include the extracellular region of an ACE2 polypeptide and can lack a transmembrane domain. The chaff polypeptide can consist essentially of or can consist of an amino acid sequence set forth in SEQ ID NO:8 or SEQ ID NO:9.

[0018] In another aspect, this document features for a composition including a SC-Ad, where the SC-Ad has a genome which lacks at least a portion of a nucleic acid sequence that encodes an adenovirus polypeptide, where the SC-Ad includes the adenovirus polypeptide, and where the SC-Ad includes (a) a nucleic acid sequence encoding an immunogen, (b) a nucleic acid sequence encoding an adjuvant polypeptide, and (c) a nucleic acid sequence encoding a chaff polypeptide.

[0019] In another aspect, this document features methods for inducing an immune response against a virus in a mammal. The methods can include, or consist essentially of, administering to a mammal i) a SC-Ad, where the SC-Ad has a genome which lacks at least a portion of a nucleic acid sequence that encodes an adenovirus polypeptide, where the SC-Ad includes the adenovirus polypeptide, and where the SC-Ad includes (a) a nucleic acid sequence encoding an immunogen, (b) a nucleic acid sequence encoding an adjuvant polypeptide, and (c) a nucleic acid sequence encoding a chaff polypeptide, or ii) a composition including a SC-Ad, where the SC-Ad has a genome which lacks at least a portion of a nucleic acid sequence that encodes an adenovirus polypeptide, where the SC-Ad includes the adenovirus polypeptide, and where the SC-Ad includes (a) a nucleic acid sequence encoding an immunogen, (b) a nucleic acid sequence encoding an adjuvant polypeptide, and (c) a nucleic acid sequence encoding a chaff polypeptide, under conditions where the SC-Ad infects a cell of the mammal, and where expression of the immunogen in the cell leads to induction of the immune response. The mammal can be a human. The virus can be a coronavirus, and the immunogen can be associated with the coronavirus. The coronavirus can be a betacoronavirus. The betacoronavirus can be SARS-CoV-2. The administering can include mucosal delivery of the SC-Ad.

[0020] In another aspect, this document features for a SC-Ad, where the SC-Ad has a genome lacking at least a portion of a nucleic acid sequence that encodes an adenovirus polypeptide, where the SC-Ad includes the adenovirus polypeptide, and where the SC-Ad includes a nucleic acid sequence encoding an immunogen expressed by or shed by an allergen. The adenovirus polypeptide can be a fiber polypeptide, a V polypeptide, a hexon polypeptide, a penton base polypeptide, or a pIIIa polypeptide. The SC-Ad also can include a nucleic acid sequence encoding an adjuvant polypeptide. The adjuvant polypeptide can be a GM-CSF polypeptide, an IL-4 polypeptide, an IL-21 polypeptide, a CD40L polypeptide, a 4-1BBL polypeptide, a TGF-β polypeptide, a Clostridium difficile TcdA polypeptide, a C. difficile TcdB polypeptide, or a biologically active fragment thereof. The SC-Ad also can include a nucleic acid sequence encoding a chaff polypeptide. The chaff polypeptide can be a fragment of an ACE2 polypeptide. The fragment of an ACE2 polypeptide can include the extracellular region of an ACE2 polypeptide and can lack a transmembrane domain. The chaff polypeptide can consists essentially of or consists of an amino acid sequence set forth in SEQ ID NO:8 or SEQ ID NO:9.

[0021] In another aspect, this document features for a composition including a SC-Ad, where the SC-Ad has a genome lacking at least a portion of a nucleic acid sequence that encodes an adenovirus polypeptide, where the SC-Ad includes the adenovirus polypeptide, and where the SC-Ad includes a nucleic acid sequence encoding an immunogen expressed by or shed by an allergen.

[0022] In another aspect, this document features methods for inducing an immune response against an allergen in a mammal. The methods can include, or consist essentially of, administering to a mammal i) a SC-Ad, where the SC-Ad has a genome lacking at least a portion of a nucleic acid sequence that encodes an adenovirus polypeptide, where the SC-Ad includes the adenovirus polypeptide, and where the SC-Ad includes a nucleic acid sequence encoding an immunogen expressed by or shed by an allergen, or ii) a composition including a SC-Ad, where the SC-Ad has a genome lacking at least a portion of a nucleic acid sequence that encodes an adenovirus polypeptide, where the SC-Ad includes the adenovirus polypeptide, and where the SC-Ad includes a nucleic acid sequence encoding an immunogen expressed by or shed by an allergen, under conditions where the SC-Ad infects a cell of the mammal, and where expression of the immunogen in the cell leads to induction of the immune response. The mammal can be a human.

[0023] In another aspect, this document features for a SC-Ad, where the SC-Ad has a genome lacking at least a portion of a nucleic acid sequence that encodes an adenovirus polypeptide, where the SC-Ad includes the adenovirus polypeptide, and where the SC-Ad includes a nucleic acid sequence encoding an immunogen expressed by a cancer cell. The adenovirus polypeptide can be a fiber polypeptide, a V polypeptide, a hexon polypeptide, a penton base polypeptide, or a pIIIa polypeptide. The SC-Ad also can include a nucleic acid sequence encoding an adjuvant polypeptide. The adjuvant polypeptide can be a GM-CSF polypeptide, an IL-4 polypeptide, an IL-21 polypeptide, a CD40L polypeptide, a 4-1BBL polypeptide, a TGF-β polypeptide, a Clostridium difficile TcdA polypeptide, a C. difficile TcdB polypeptide, or a biologically active fragment thereof. The SC-Ad also can include a nucleic acid sequence encoding a chaff polypeptide. The chaff polypeptide can be a fragment of an ACE2 polypeptide. The fragment of an ACE2 polypeptide can include the extracellular region of an ACE2 polypeptide and can lack a transmembrane domain. The chaff polypeptide can consist essentially of or can consist of an amino acid sequence set forth in SEQ ID NO:8 or SEQ ID NO:9.

[0024] In another aspect, this document features for a composition including a SC-Ad, where the SC-Ad has a genome lacking at least a portion of a nucleic acid sequence that encodes an adenovirus polypeptide, where the SC-Ad includes the adenovirus polypeptide, and where the SC-Ad includes a nucleic acid sequence encoding an immunogen expressed by a cancer cell.

[0025] In another aspect, this document features methods for inducing an immune response against a cancer cell in a mammal. The methods can include, or consist essentially of, administering to a mammal i) a SC-Ad, where the SC-Ad has a genome lacking at least a portion of a nucleic acid sequence that encodes an adenovirus polypeptide, where the SC-Ad includes the adenovirus polypeptide, and where the SC-Ad includes a nucleic acid sequence encoding an immunogen expressed by a cancer cell, or ii) a composition including a SC-Ad, where the SC-Ad has a genome lacking at least a portion of a nucleic acid sequence that encodes an adenovirus polypeptide, where the SC-Ad includes the adenovirus polypeptide, and where the SC-Ad includes a nucleic acid sequence encoding an immunogen expressed by a cancer cell, under conditions where the SC-Ad infects a cell of the mammal, and where expression of the immunogen in the cell leads to induction of the immune response. The mammal can be a human.

[0026] Unless otherwise defined, all technical and scientific terms used herein have the same meaning as commonly understood by one of ordinary skill in the art to which this invention pertains. Although methods and materials similar or equivalent to those described herein can be used to practice the invention, suitable methods and materials are described below. All publications, patent applications, patents, and other references mentioned herein are incorporated by reference in their entirety. In case of conflict, the present specification, including definitions, will control. In addition, the materials, methods, and examples are illustrative only and not intended to be limiting.

[0027] The details of one or more embodiments of the invention are set forth in the accompanying drawings and the description below. Other features, objects, and advantages of the invention will be apparent from the description and drawings, and from the claims.

### DESCRIPTION OF THE DRAWINGS

[0028] FIGS. 1A-1B. Schematic of an exemplary TcdA/B fusion protein and an exemplary SC-Ad6 plasmid expressing a fusion protein according to some embodiments. (FIG. 1A) A TcdA/B fusion protein includes a human alpha 1-antitrypsin (AAT) secretory leader sequence and the RBDs of TcdA and TcdB that are separated by two furin cleavage sites. (FIG. 1B) A SC-Ad6 plasmid expressing the TcdA/B fusion using the CMV promoter.

[0029] FIGS. 2A-2B. Single-cycle adenovirus expression of C. difficile toxins A and B fusion protein. Western blot detecting expression of (FIG. 2A) TcdA and (FIG. 2B) TcdB fragments in the cell lysates and media taken from uninfected cells, cells infected with an Ad control (SC-Ad6-GFP-luciferase (GL)), and cells infected with SC-Ad6-TcdA/B.

[0030] FIGS. 3A-3C. Serum antibody responses in immunized CD1 mice and toxin A challenge. Male and female CD1 mice (n=10) were vaccinated intramuscularly (i.m.) with 1×10¹⁰ virus particles of SC-Ad6-PEB1, SC-Ad6-TcdA/B, or PBS. Serum collected at week 6 was assayed by ELISA and a neutralization assay. (FIG. 3A) Serum endpoint titers at week 6 were significantly (p=0.0066) higher in female mice immunized with SC-Ad-TcdA/B than in males (Geometric mean with 95% CI). (FIG. 3B) Neutralizing titers for Toxin A were significantly higher in the female and male groups compared to sex matched controls (Adjusted p=0.0001 and 0.0238 for females and males by Dunn's). (FIG. 3C) Combined male and female toxin A survival curve shows significant survival compared to PBS or PEB1 control animals (p<0.0001).

[0031] FIGS. 4A-4D. SC-Ad6-TcdA/B provides protection against lethal challenge long after a single immunization. Female CD1 mice (n=5) were vaccinated i.m. with 1×10¹⁰ virus particles of SC-Ad6-PEB1, SC-Ad6-TcdA/B, or PBS. Serum collected at weeks 3, 6, 14, 26, and 36 were titrated to determine binding endpoint titers for (FIG. 4A) toxin A and (FIG. 4B) toxin B represented as geometric mean with standard deviation. (FIG. 4C) Mean neutralizing titers for toxin B were significantly higher in the SC-Ad-TcdA/B than SC-Ad-PEB1 immunized animals (p>0.0079 by Mann Whitney). (FIG. 4D) Survival curve for SC-Ad-TcdA/B vaccinated mice challenged with toxin A shows significant protection compared to PBS or PEB1 control animals (p=0.0019 and 0.0021, respectively).

[0032] FIGS. 5A-5C. Serum neutralizing antibody responses in immunized Syrian Hamsters and protection from lethal spore challenge. Female Syrian Hamsters (n=10) were vaccinated intranasally (i.n.) or i.m. with 1×10¹¹ virus particles of SC-Ad6-TcdA/B, or i.n. with PBS. Serum collected at 6, 12, and 18 weeks after immunization were assayed to determine mean neutralizing titers for (FIG. 5A) toxin A and (FIG. 5B) toxin B (*Adjusted p<0.05 compared to control, **Adjusted p<0.05 compared to control and i.n. route). (FIG. 5C) Survival curve for SC-Ad-TcdA/B vaccinated animals challenged with UK1 spores shows significant protection compared to PBS control animals (p<0.0001).

[0033] FIGS. 6A-6D. SC-Ad6-TcdA/B provides protection against lethal spore challenge 45 weeks after single immunization. Female Syrian Hamsters (n=10) were vaccinated i.n. or i.m. with 1×10¹¹ virus particles of SC-Ad6-TcdA/B, or i.n. with PBS. Serum collected at weeks 6, 12, and 18, 25, and 36 weeks after immunization were assayed to determine mean neutralizing titers for (FIG. 6A) toxin A and (FIG. 6B) toxin B (*Adjusted p<0.05 compared to control, **Adjusted p<0.05 compared to control and i.n. route). X-axis break represents the termination of the low dose challenge study; serum collected at week 36 from remaining animals in each group (n=5). (FIG. 6C) Survival curve for i.n. (n=5) and i.m. (n=4)SC-Ad-TcdA/B vaccinated animals challenged with UK1 spores 45 weeks after single immunization shows significant protection compared to PBS control animals (n=4) (p=0.0027 vs p=0.0067, respectively). (FIG. 6D) Week 36 neutralizing toxin A and toxin B neutralizing titers of i.n. immunized animals that survived the challenge compared to non-survivors.

[0034] FIG. 7. Blood chemistry of SC-Ad6-TcdA/B vaccinated animals. Groups of 10 Syrian hamsters were immunized a single time with 1011 virus particles of SC-Ad6-TcdA/B by the i.n. or i.m. route. Control animals received i.n. PBS. Blood was collected 3 days after immunization for clinical chemistry.

[0035] FIGS. 8A-8C. Blood chemistry and CBC of SC-Ad6-TcdA/B vaccinated animals. Groups of 10 Syrian hamsters were immunized a single time with 1011 virus particles of SC-Ad6-TcdA/B by the i.n. or i.m. route. Control animals received i.n. PBS. Blood was collected ½ of the cohort (n=5 per group) (FIG. 8A) 3 and the other ½ of the cohort (n=5 per group) (FIG. 8B) 4 days after immunization for clinical chemistry. (FIG. 8C) Blood was collected on day 4 from ½ of the hamsters (n=5 per group) for CBC.

[0036] FIG. 9. Titration of toxin on Vero cells.

[0037] FIG. 10. Titer of Toxin B neutralizing antibodies (nAbs) 26 weeks post challenge.

[0038] FIG. 11. Survival curve 8 weeks after Toxin A challenge.

[0039] FIGS. 12A-12B. Schematic representations of exemplary SC-Ad vectors that can be used to deliver nucleic acid encoding one or more immunogens according to some embodiments. (FIG. 12A) A schematic of an exemplary SC-Ad vector encoding a SARS-CoV-2 Spike variant immunogen and, optionally, one or more adjuvants and/or one more chaff polypeptides. (FIG. 12B) A schematic of an exemplary SC-Ad vector encoding a SARS-CoV-2 Spike variant immunogen and, optionally, one or more adjuvants and/or one more chaff polypeptides. The polypeptide encoding sequence of pIIIA, which is normally located between 52K and penton, is deleted.

[0040] FIG. 13. SARS-CoV-2 Spike gene and RBD-Sb subdomain genes with restriction sites.

[0041] FIG. 14. Western blot of Spike polypeptide expressed by SC-Ad vector. 1°=anti-spike polyclonal (1:1000); 2°=protein A/G-HRP (1:10,000); Substrate=Pico.

[0042] FIG. 15. SC-Ad-Spike infects ACE2⁺ cells and forms cell fusion events.

[0043] FIG. 16. SC-Ad-Spike infects ACE2⁺ cells, forms cell fusion events, and expresses adenovirus DNA and adenovirus protein adjuvants.

[0044] FIG. 17. Western blot of ACE2 expression in 293-IIIA-ACE2 cells. 1°=anti-ACE2 (1:1000); 2°=protein A/G-HRP (1:10,000).

[0045] FIG. 18. Western blot of Spike polypeptide expressed by various plasmid expression vectors.

[0046] FIG. 19. Antibody responses in mice 2 weeks after administration of plasmid vectors expressing Spike polypeptide or negative control GFP-Luciferase (GL) vector.

[0047] FIGS. 20A-20F. IgA and IgG antibody responses in mice 2 (FIGS. 20A, 20C, and 20D) or 6 weeks (FIG. 20B) after intranasal (IN) or intramuscular (IM) administration of SC-Ad expressing Spike polypeptide or negative control SC-Ad expressing Zika protein or buffer (PBS). IFNγ (FIG. 20E) and CD8 T cell counts (FIG. 20F) were also measured.

[0048] FIG. 21. Western blot of Spike polypeptide expression by replication-defective adenovirus (RD-Ad) and SC-Ad expressing SARS-CoV-2 spike.

[0049] FIG. 22. An exemplary SC-Ad carrying SARS-CoV-2 Spike or RBD with centralized influenza HA gene H1-CON.

[0050] FIG. 23. An exemplary SC-Ad carrying centralized influenza HA gene H1-CON covering H1 hemagglutinins and H1-5 CON covering H1-H5 hemagglutinin sequences.

[0051] FIG. 24. Serum antibodies generated by plasmid vaccines are increased by co-immunization with granulocyte-macrophage colony-stimulating factor (GM-CSF) adjuvant plasmid.

[0052] FIG. 25. Serum antibodies 6 weeks after a single i.n. administration of SC-Ad HIV Env in combination with SC-Ads expressing genetic adjuvants.

[0053] FIG. 26. Vaginal antibodies 6 weeks after a single i.n. administration of SC-Ad HIV Env in combination with SC-Ads expressing genetic adjuvants.

[0054] FIG. 27. Vaginal antibodies after an i.m. administration of SC-Ad HIV Env in combination with SC-Ads expressing genetic adjuvants and followed by i.m. or i.n. administration of HIV-1 Envelope SOSIP polypeptide.

[0055] FIG. 28. Schematic representation of an exemplary Ad vector that can be used to deliver nucleic acid encoding a gamma mink Spike polypeptide variant immunogen according to some embodiments.

[0056] FIG. 29. Schematic representation of an exemplary Ad vector that can be used to deliver nucleic acid encoding a B.1.617.2 delta Spike polypeptide variant immunogen according to some embodiments.

[0057] FIG. 30. Schematic representation of an exemplary Ad vector that can be used to deliver nucleic acid encoding a B.1.617.2 delta plus Spike polypeptide variant immunogen according to some embodiments.

[0058] FIG. 31. Schematic representation of an exemplary Ad vector that can be used to deliver nucleic acid encoding a SARS-CoV-2 M/N fusion polypeptide immunogen according to some embodiments.

[0059] FIG. 32. Antibody responses generated by single-cycle Ad6 and Ad657 vectors expressing the original spike polypeptide or the gamma mink spike polypeptide. A 1/1000 dilution of sera was analyzed by ELISA against Spike 51 polypeptide for IgG antibodies that bind the polypeptide.

[0060] FIG. 33. Schematic representation of an exemplary Ad vector that can be used to deliver nucleic acid encoding a C. difficile tcdB/B (tcdBx2) fusion polypeptide immunogen according to some embodiments.

[0061] FIG. 34. Schematic representation of an exemplary Ad vector that can be used to deliver nucleic acid encoding a lambda Spike polypeptide variant immunogen according to some embodiments.

[0062] FIG. 35. Schematic representation of an exemplary Ad vector that can be used to deliver nucleic acid encoding an epsilon Spike polypeptide variant immunogen according to some embodiments.

### DETAILED DESCRIPTION

[0063] This document provides adenovirus vectors and methods and materials for using adenovirus vectors. In some cases, adenovirus vectors encoding one or more (e.g., one, two, three, four, five, six, seven, eight, nine, ten, or more) immunogens can be used to deliver immunogens to a mammal (e.g., a human) such that the mammal produces an effective immune response (e.g., an immune response against those immunogens). For example, adenovirus vectors encoding one or more immunogens can be used to deliver immunogens to a mammal (e.g., a human) such that the mammal produces antibodies against a pathogen, allergen, and/or cancer cell associated with those immunogens. In some cases, nucleic acid molecules that can encode an adenovirus vector encoding one or more immunogens can be used to deliver immunogens to a mammal (e.g., a human) such that the mammal produces an effective immune response (e.g., an immune response against those immunogens). For example, nucleic acid molecules that can encode an adenovirus vector encoding one or more immunogens can be used to deliver immunogens to a mammal (e.g., a human) such that the mammal produces antibodies against a pathogen, allergen, and/or cancer cell associated with those immunogens.

[0064] This document also provides adenovirus vectors encoding one or more (e.g., one, two, three, four, five, six, seven, eight, nine, ten, or more) immunogens (e.g., SC-Ads encoding one or more immunogens), nucleic acid molecules encoding adenovirus vectors encoding one or more immunogens, cell lines containing adenovirus vectors encoding one or more immunogens, methods for using adenovirus vectors encoding one or more immunogens to deliver the immunogen(s) to cells in vitro or in vivo, and methods for using adenovirus vectors encoding one or more immunogens to induce immune responses within a mammal (e.g., a human).

[0065] An adenovirus vector provided herein (e.g., an adenovirus vector encoding one or more immunogens) can be derived from any adenovirus. An adenovirus used to create an adenovirus vector provided herein can be any appropriate serotype (e.g., Ad1-Ad57). In some cases, an adenovirus can be a replication competent adenovirus. In some cases, an adenovirus can be a replication defective adenovirus. In some cases, an adenovirus can be capable of infecting a human cell (e.g., can be a human adenovirus). In some cases, an adenovirus can be capable of infection a non-human cell (e.g., can be a non-human adenovirus) such as chimpanzee cells. Examples of adenoviruses that can be used to make an adenovirus vector provided herein include, without limitation, Ad5 adenoviruses, Ad6 adenoviruses, ChAdOx1, and ChAdOx2.

[0066] In some cases, an adenovirus vector provided herein (e.g., an adenovirus vector encoding one or more immunogens) can be a SC-Ad. A SC-Ad can have a genome which lacks all or a portion of at least of one of the following adenovirus nucleic acid sequences: fiber protein-encoding sequence, V protein-encoding sequence, hexon-encoding sequence, penton base-encoding sequence (also referred to as a pIII-encoding sequence), VA RNA-encoding sequence, pIIIa protein-encoding sequence (also referred to as a minor capsid protein-encoding sequence), or other early or late gene product-encoding sequences. Examples of nucleic acid sequences that encode adenoviral polypeptides include, without limitation, those set forth in GenBank gi numbers 209842, 58478, or 2935210, and/or annotated in GenBank accession numbers M73260, X17016, or AF030154. In some cases, a deletion of all or a portion of the nucleic acid encoding one or more of the following polypeptides can be engineered into a nucleic acid encoding an adenovirus such that the adenovirus vector does not encode that full-length adenovirus polypeptide or a fully functional version of that adenovirus polypeptide: fiber protein-encoding sequence, V protein-encoding sequence, hexon-encoding sequence, penton base-encoding sequence, VA RNA-encoding sequence, pIIIa protein-encoding sequence, or other early or late gene product-encoding sequences. Such deletions can be any length that results in the deletion of one or more encoded amino acids and in a reduction or elimination of the normal function of that polypeptide. For example, portions of a nucleic acid sequence of an adenovirus can be removed such that the otherwise encoded polypeptide lacks 5, 6, 7, 8, 9, 10, 15, 20, 25, 30, or more amino acid residues and lacks its normal activity. The portion or portions to be deleted can be removed from any location along the length of the sequence. For example, a portion of an adenovirus nucleic acid sequence can be removed at the 5′ end, the 3′ end, or an internal region of an adenovirus nucleic acid such as a fiber protein-encoding sequence, V protein-encoding sequence, hexon-encoding sequence, penton base-encoding sequence, VA RNA-encoding sequence, pIIIa protein-encoding sequence, or other early or late gene product-encoding sequences. In some cases, a SC-Ad can be as described elsewhere (see, e.g., Matchett et al., J. of Virol., 2019 93(10):e02016-18 (2019); and International PCT Patent Application Publication No. WO 2009/111738).

[0067] An adenovirus vector provided herein (e.g., an adenovirus vector encoding one or more immunogens) can include a nucleic acid sequence encoding any appropriate immunogen (e.g., a nucleic acid that drives expression of any appropriate immunogen). In some cases, an immunogen can be an antigen. An immunogen can be a full-length immunogenic polypeptide or a portion thereof (e.g., can be derived from an immunogenic polypeptide).

[0068] When an immunogenic polypeptide is from a pathogen, the immunogenic polypeptide can be from any type of pathogen (e.g., a virus, a bacterium, a protozoan, a prion, a viroid, or a fungus). In some cases, an immunogenic polypeptide can be a polypeptide expressed by a virus (e.g., a viral polypeptide). For example, an immunogenic polypeptide can be a polypeptide expressed by a coronavirus (e.g., a beta-coronavirus). Examples of viruses that can express an immunogenic polypeptide include, without limitation, SARS-CoV, HCoV NL63, HKU1, MERS-CoV, SARS-CoV-2, HIV-1, hepatitis B virus, hepatitis C virus, hepatitis D virus, hepatitis E virus, influenza, Ebola virus, Chiningunya virus, Zika virus, cytomegalovirus, West Nile virus, and those described in Table 3-1 of “Learning from SARS: Preparing for the Next Disease Outbreak: Workshop Summary.” Institute of Medicine (US) Forum on Microbial Threats; Knobler S, Mahmoud A, Lemon S, et al., editors. Washington (DC): National Academies Press (US); 2004. In some cases, an immunogen can be derived from a polypeptide expressed by a bacterium (e.g., a bacterial polypeptide). Examples of bacteria that express polypeptides from which an immunogen can be derived include, without limitation, Clostridium (e.g., C. difficile), Staphylococcus aureus (e.g. methicillin-resistant S. aureus), Campylobacter (e.g. Campylobacter jejuni), Mycobacteria (e.g. M tuberculosis), and Borrelia (B. burgdorferi). Examples of immunogenic polypeptides that can be expressed by a pathogen include, without limitation, C. difficile Toxin A (TcdA) polypeptides, C. difficile Toxin B (TcdB) polypeptides, coronavirus Spike polypeptides, the amino acid sequence set forth in SEQ ID NO:1 (see, e.g., Example 5), coronavirus nucleoproteins, coronavirus membrane proteins, coronavirus envelope proteins, and coronavirus non-structural proteins (e.g., coronavirus non-structural proteins 1-16). For example, an immunogenic polypeptide associated with a pathogen can have, or can be encoded by, a sequence set forth in, for example, National Center for Biotechnology Information (NCBI) Accession Nos: MN938384 and AY772062.

[0069] When an immunogenic polypeptide is from an allergen, the immunogenic polypeptide can be from any type of allergen (e.g., a substance capable of triggering an immune response that results in an allergic reaction). Examples of allergens that can express and/or shed an immunogenic polypeptide include, without limitation, Fel d 7, Can f1, beta-lactoglobulin, prolamin, parvalbumin, gliadin, Fel d1, chitinase, glutenin, cupin, prolamin, profilins, polcalcins, bet v-1-related proteins, 2S albumins, vicilins, legumins, nsLTPs, and Aed a 2. For example, adenovirus vectors encoding one or more immunogens described herein can be used to deliver immunogens to a mammal (e.g., a human) such that the mammal produces antibodies against an allergen associated with those immunogens. For example, nucleic acid molecules that can encode an adenovirus vector encoding one or more immunogens can be used to deliver immunogens to a mammal (e.g., a human) such that the mammal produces antibodies against an allergen associated with those immunogens. For example, an immunogenic polypeptide associated with an allergen can have, or can be encoded by, a sequence set forth in, for example, NCBI Accession Nos: NP_001363134.1, AAD56719, NP_001363136.1, NP_001363139.1, P27762.1, P10414.2, P15494.2, P43176.2, NP_001191706.1, NP_001003190.1, XP_030099003.1, or XP_001657779.1.

[0070] When an immunogenic polypeptide is from a cancer cell (e.g., a cancer cell within a mammal having cancer), the immunogenic polypeptide can be expressed by any cancer cell. For example, an immunogenic polypeptide expressed by a cancer cell can be a tumor antigen. In some cases, an immunogenic polypeptide expressed by a cancer cell can be a cell surface tumor antigen. In some cases, an immunogenic polypeptide expressed by a cancer cell can be a tumor-associated antigen (TAA; e.g., an antigen, such as an abnormal protein, present on tumor cells). In some cases, an immunogenic polypeptide can be a tumor-specific antigen (TSA; e.g., an antigen present only on tumor cells). Examples of immunogenic polypeptides that can be expressed by a cancer cell and used as described herein include, without limitation, folate receptor alpha, mucin 1 (MUC-1), human epidermal growth factor receptor 2 (HER-2), estrogen receptor (ER), epidermal growth factor receptor (EGFR), folate receptor alpha, mesothelin, alphafetoprotein (AFP), carcinoembryonic antigen (CEA), CA-125, epithelial tumor antigen (ETA), melanoma-associated antigen (MAGE), antigens produced by Epstein-Barr Viruses, and antigens produced by human papilloma viruses. For example, adenovirus vectors encoding one or more immunogens as described herein can be used to deliver immunogens to a mammal (e.g., a human) such that the mammal produces antibodies against cancer cells associated with those immunogens. For example, nucleic acid molecules that can encode an adenovirus vector encoding one or more immunogens as described herein can be used to deliver immunogens to a mammal (e.g., a human) such that the mammal produces antibodies against cancer cells associated with those immunogens. For example, an immunogenic polypeptide associated with a cancer cell can have, or can be encoded by, a sequence set forth in, for example, NCBI Accession Nos: XP_002754883.1, AAA03229.1, Q02496.2, AAD33253.1, CEQ32409.1, YP_401631.1, YP_401632.1, or QAR15051.1.

[0071] When an immunogenic polypeptide is from a cancer cell (e.g., a cancer cell within a mammal having cancer), the immunogenic polypeptide can be expressed by any type of cancer cell. Examples of such cancers include, without limitation, lung cancers, breast cancers, prostate cancers, liver cancer, kidney cancers, brain cancers, B cell cancers, T cell cancers, ovarian cancers, and skin cancers.

[0072] An immunogen can be a full-length immunogenic polypeptide or a portion thereof (e.g., can be derived from an immunogenic polypeptide). For example, a nucleic acid sequence encoding an immunogenic polypeptide can be modified to remove portions of nucleic acid such that the encoded polypeptide lacks any number of amino acids (e.g., 5, 10, 15, 20, 30 amino acids, or all amino acids of the immunogenic polypeptide). In some cases, portions of a nucleic acid sequence encoding an immunogenic polypeptide can be removed from anywhere along the length of the sequence. For example, portions of the nucleic acid sequence can be removed at the 5′ end, the 3′ end, or an internal region of the target nucleic acid. In some cases, an immunogen can be designed to be secreted from cells infected with the adenovirus vector encoding the immunogen. For example, a nucleic acid sequence encoding an ER retention sequence can be removed from a nucleic acid sequence encoding an immunogen (e.g., such that the encoded immunogen lacks an ER retention sequence). In some cases, an immunogen can be designed to extend from cells infected with the adenovirus vector encoding the immunogen into the extracellular space. For example, an immunogen can include an ectodomain of an immunogenic polypeptide. In some cases, an immunogen can bind (e.g., can be designed to bind) to viral receptor (e.g., an ACE2 polypeptide). For example, an immunogen can include a receptor binding domain of an immunogenic polypeptide.

[0073] In some cases, an immunogen can include (e.g., can be a fusion polypeptide of) two or more immunogenic polypeptides described herein. For example, an immunogen can include a first immunogenic polypeptide and a second immunogenic polypeptide. In some cases, a first immunogenic polypeptide and a second immunogenic polypeptide can be different polypeptides. For example, an immunogen can include a tcdA polypeptide and a tcdB polypeptide (e.g., a tcdA/B fusion polypeptide). In some cases, a first immunogenic polypeptide and a second immunogenic polypeptide can be the same polypeptide. For example, an immunogen can include a tcdB polypeptide and a tcdB polypeptide (e.g., a tcdB/B fusion polypeptide). When an immunogen includes a first immunogenic polypeptide and a second immunogenic polypeptide, the first immunogenic polypeptide can be derived from a first pathogen, and the second immunogenic polypeptide can be derived from a second pathogen. The first pathogen and the second pathogen can be the same pathogen or different pathogens. When the first pathogen and the second pathogen are the same pathogen, the first immunogenic polypeptide and the second immunogenic polypeptide can be derived from the different strains of that pathogen. For example, a first immunogenic polypeptide and a second immunogenic polypeptide can be derived from different strains of the same bacterium (e.g., C. difficile).

[0074] Examples of immunogens derived from immunogenic polypeptides that can be used as described herein include, without limitation, the amino acid sequence set forth in SEQ ID NO:2 (see, e.g., Example 5), the amino acid sequence set forth in SEQ ID NO:3 (see, e.g., Example 5), the amino acid sequence set forth in SEQ ID NO:4 (see, e.g., Example 5), the amino acid sequence set forth in SEQ ID NO:11 (see, e.g., Example 5), the amino acid sequence set forth in SEQ ID NO:12 (see, e.g., Example 5), the amino acid sequence set forth in SEQ ID NO:13 (see, e.g., Example 5), the amino acid sequence set forth in SEQ ID NO:14 (see, e.g., Example 5), the amino acid sequence set forth in SEQ ID NO:15 (see, e.g., Example 5), the amino acid sequence set forth in SEQ ID NO:16 (see, e.g., Example 5), the amino acid sequence set forth in SEQ ID NO:17 (see, e.g., Example 5), the amino acid sequence set forth in SEQ ID NO:18 (see, e.g., Example 5), the amino acid sequence set forth in SEQ ID NO:19 (see, e.g., Example 5), the amino acid sequence set forth in SEQ ID NO:42 (see, e.g., Example 5), the amino acid sequence set forth in SEQ ID NO:43 (see, e.g., Example 5), the amino acid sequence set forth in SEQ ID NO:44 (see, e.g., Example 5), the amino acid sequence set forth in SEQ ID NO:45 (see, e.g., Example 5), the amino acid sequence set forth in SEQ ID NO:46 (see, e.g., Example 5), the amino acid sequence set forth in SEQ ID NO:47 (see, e.g., Example 5), and the amino acid sequence set forth in SEQ ID NO:48 (see, e.g., Example 5).

[0075] In some cases, an immunogen described herein can be a variant of a wild-type immunogen. For example, a variant of a coronavirus Spike polypeptide (e.g., a SARS-CoV-2 Spike polypeptide) can comprise or consist essentially of an amino acid sequence set forth in any one of SEQ ID NOs:1-4 with one or more (e.g., one, two, three, four, five, six, seven, eight, nine, ten, or more) amino acid deletions, additions, substitutions, or combinations thereof. Examples of amino acid deletions that can be present in a variant of a coronavirus Spike polypeptide (e.g., as numbered in any one of SEQ ID NOs:1-4) include, without limitation, a deletion of residues 69-70, a deletion of residue 144, a deletion of residues 156-157, a deletion of residues 241-243, and a deletion of residues 246-252. Examples of amino acid substitutions that can be present in a variant of a coronavirus Spike polypeptide (e.g., as numbered in any one of SEQ ID NOs:1-4), include, without limitation, a L5F amino acid substitution, a S13I amino acid substitution, a L18F amino acid substitution, a T19R amino acid substitution, a T20N amino acid substitution, a P26S amino acid substitution, a G75I amino acid substitution, a A67V amino acid substitution, a V70F amino acid substitution, a T76I amino acid substitution, a D80A amino acid substitution, a D80G amino acid substitution, a T951 amino acid substitution, a D138Y amino acid substitution, a G142D amino acid substitution, a W152C amino acid substitution, a E154K amino acid substitution, a F1575 amino acid substitution, a R158G amino acid substitution, a R1905 amino acid substitution, a D215G amino acid substitution, a A222V amino acid substitution, a D253G amino acid substitution, a W258L amino acid substitution, a K417N amino acid substitution, a K417T amino acid substitution, a L452R amino acid substitution, a L452Q amino acid substitution, a Y453F amino acid substitution, a S477N amino acid substitution, a T478K amino acid substitution, a E484Q amino acid substitution, a E484K amino acid substitution, a F490S amino acid substitution, a E484K amino acid substitution, a S494P amino acid substitution, a N501Y amino acid substitution, a A570D amino acid substitution, a D614G amino acid substitution, a H655Y amino acid substitution, a Q677H amino acid substitution, a P681H amino acid substitution, a P681R amino acid substitution, a A701V amino acid substitution, a T7161 amino acid substitution, a T859N amino acid substitution, a F888L amino substitution, a D950N amino acid substitution, a Q957R amino acid substitution, a S982A amino acid substitution, a K986P amino acid substitution, a V987P amino acid substitution, a T10271 amino acid substitution, a Q1071H amino acid substitution, a D1118H amino acid substitution, and a K1191N amino acid substitution. For example, a variant of a coronavirus Spike polypeptide can include a K986P amino acid substitution and a V987P amino acid substitution (e.g., a PP substitution). In some cases, a variant of a coronavirus Spike polypeptide can be a gamma mink variant of a coronavirus Spike polypeptide. In some cases, a variant of a coronavirus Spike polypeptide can be a delta variant of a coronavirus Spike polypeptide. In some cases, a variant of a coronavirus Spike polypeptide can be a lambda variant of a coronavirus Spike polypeptide. In some cases, a variant of a coronavirus Spike polypeptide can be an epsilon variant of a coronavirus Spike polypeptide. In some cases, a variant of a coronavirus Spike polypeptide can be a delta plus variant of a coronavirus Spike polypeptide.

[0076] In some cases, an immunogen described herein can have an amino acid sequence with at least 85% sequence identity (e.g., at least 88% sequence identity, at least 90% sequence identity, at least 93% sequence identity, at least 95% sequence identity, at least 97% sequence identity, at least 98% sequence identity, or at least 99% sequence identity) to the amino acid sequence set forth in any one of SEQ ID NOs:1-4.

[0077] The percent sequence identity between a particular amino acid sequence and a sequence referenced by a particular sequence identification number is determined as follows. First, an amino acid sequence is compared to the sequence set forth in a particular sequence identification number using the BLAST 2 Sequences (B12seq) program from the stand-alone version of BLASTZ containing BLASTN version 2.0.14 and BLASTP version 2.0.14. This stand-alone version of BLASTZ can be obtained online at fr.com/blast or at ncbi.nlm.nih.gov. Instructions explaining how to use the Bl2seq program can be found in the readme file accompanying BLASTZ. B12seq performs a comparison between two sequences using either the BLASTN or BLASTP algorithm. BLASTN is used to compare nucleic acid sequences, while BLASTP is used to compare amino acid sequences. To compare two nucleic acid sequences, the options are set as follows: -i is set to a file containing the first nucleic acid sequence to be compared (e.g., C:\seq1.txt); -j is set to a file containing the second nucleic acid sequence to be compared (e.g., C:\seq2.txt); -p is set to blastn; -o is set to any desired file name (e.g., C:\output.txt); -q is set to -1; -r is set to 2; and all other options are left at their default setting. For example, the following command can be used to generate an output file containing a comparison between two sequences: C:\B12seq c:\seq1.txt -j c:\seq2.txt -p blastn -o c:\output.txt -q -1 -r 2. To compare two amino acid sequences, the options of Bl2seq are set as follows: -i is set to a file containing the first amino acid sequence to be compared (e.g., C:\seq1.txt); -j is set to a file containing the second amino acid sequence to be compared (e.g., C:\seq2.txt); -p is set to blastp; -o is set to any desired file name (e.g., C:\output.txt); and all other options are left at their default setting. For example, the following command can be used to generate an output file containing a comparison between two amino acid sequences: C:\B12seq c:\seq1.txt -j c:\seq2.txt -p blastp -o c:\output.txt. If the two compared sequences share homology, then the designated output file will present those regions of homology as aligned sequences. If the two compared sequences do not share homology, then the designated output file will not present aligned sequences. Once aligned, the number of matches is determined by counting the number of positions where an identical nucleotide or amino acid residue is presented in both sequences. A matched position refers to a position in which identical amino acid occur at the same position in aligned sequences. The percent sequence identity is determined by dividing the number of matches by the length of the sequence set forth in the identified sequence (e.g., SEQ ID NO:1, SEQ ID NO:2, SEQ ID NO:3, or SEQ ID NO:4), followed by multiplying the resulting value by 100. For example, an amino acid sequence that has 220 matches when aligned with the sequence set forth in SEQ ID NO:2 is 93.2 percent identical to the sequence set forth in SEQ ID NO:2 (i.e., 220±236×100=93.2). It is noted that the percent sequence identity value is rounded to the nearest tenth. For example, 75.1, 75.2, 75.3, and 75.4 is rounded down to 75, while 75.5, 75.6, 75.7, 75.8, and 75.9 is rounded up to 76. It also is noted that the length value will always be an integer.

[0078] In some cases, a coronavirus Spike polypeptide variant can contain the entire amino acid sequence set forth in any one of SEQ ID NOs:1-4, except that the amino acid sequence contains from one to ten (e.g., one to nine, two to nine, one to eight, two to eight, one to seven, one to six, one to five, one to four, one to three, two, or one) amino acid additions, deletions, substitutions, or combinations thereof, provided that the coronavirus Spike polypeptide variant has the ability to induce an immune response against a coronavirus within a mammal (e.g., a human). In some cases, a coronavirus Spike polypeptide variant can consist essentially of the amino acid sequence set forth in any one of SEQ ID NOs:1-4 except that the amino acid sequence contains one, two, three, four, or five amino acid residues preceding the articulated sequence of the sequence identifier (e.g., SEQ ID NO:1), and/or has one, two, three, four, or five amino acid residues following the articulated sequence of the sequence identifier (e.g., SEQ ID NO:1), provided that the coronavirus Spike polypeptide has the ability to induce an immune response against a coronavirus within a mammal (e.g., a human).

[0079] In some cases, an adenovirus vector provided herein (e.g., an adenovirus vector encoding one or more immunogens) can include nucleic acid sequence encoding two or more (e.g., two, three, four, five, six, seven, eight, nine, ten, or more) immunogens from different immunogenic polypeptides. For example, an adenovirus vector provided herein can include nucleic acid sequence encoding an immunogen derived from a first pathogen (e.g., an immunogen derived from an immunogenic polypeptide expressed by SARS-CoV-2) and can include nucleic acid sequence encoding an immunogen derived from a second pathogen (e.g., an immunogen derived from an immunogenic polypeptide expressed by a pathogen other than SARS-CoV-2). In some cases, an adenovirus vector provided herein that includes a nucleic acid sequence encoding two or more immunogens derived from an immunogenic polypeptide expressed by different pathogens can include nucleic acid sequence encoding a polypeptide comprising, consisting of, or consisting essentially of the amino acid sequence set forth in any one of SEQ ID NOs:1-4 and can include nucleic acid sequence encoding a polypeptide comprising, consisting of, or consisting essentially of the amino acid sequence set forth in any one of SEQ ID NOs:20-21. When an adenovirus vector provided herein includes nucleic acid sequence encoding two or more immunogens from immunogenic polypeptides expressed by different pathogens, the adenovirus vector can be used to induce an immune response against two or more pathogens.

[0080] In some cases, an adenovirus vector provided herein (e.g., an adenovirus vector encoding one or more immunogens) can include nucleic acid sequence encoding two or more (e.g., two, three, four, five, six, seven, eight, nine, ten, or more) immunogens from the same immunogenic polypeptide and/or the same pathogen. For example, an adenovirus vector provided herein can include nucleic acid sequence encoding two or more immunogens derived from the same pathogen. In some cases, an adenovirus vector provided herein that includes a nucleic acid sequence encoding two or more immunogens derived from an immunogenic polypeptide expressed by influenza can include nucleic acid sequence encoding a polypeptide comprising, consisting of, or consisting essentially of the amino acid sequence set forth in SEQ ID NO:20 (see, e.g., Example 5) and can include nucleic acid sequence encoding a polypeptide comprising, consisting of, or consisting essentially of the amino acid sequence set forth in SEQ ID NO:21 (see, e.g., Example 5).

[0081] In some cases, an adenovirus vector provided herein (e.g., an adenovirus vector encoding one or more immunogens) that includes a nucleic acid sequence encoding one or more (e.g., one, two, three, four, five, six, seven, eight, nine, ten, or more) immunogens also can include one or more regulatory sequences (e.g., an enhancer or a promoter sequence such as a constitutive, inducible, and/or tissue-specific promoter sequence) to drive transcription of the immunogen(s). Examples of enhancers and promoters that can be used to drive expression of a nucleic acid sequence encoding one or more immunogens of an adenovirus provided herein include, without limitation, a CMV enhancer sequence, a CMV promoter sequence, a CAG enhancer sequence, a CAG promoter sequence, a RSV enhancer sequence, a RSV promoter sequence, a Ef1alpha enhancer sequence, a Ef1alpha promoter sequence, a ubiquitin enhancer sequence, a ubiquitin promoter sequence, adenovirus enhancer sequences, and adenovirus promoter sequences. Any appropriate method can be used to detect expression of an immunogen from adenovirus vector infected cells. For example, antibodies that recognize an immunogen can be used to detect the presence or absence of the immunogen.

[0082] In some cases, an adenovirus vector provided herein (e.g., an adenovirus vector encoding one or more immunogens) can include a nucleic acid sequence encoding one or more (e.g., one, two, three, four, five, six, seven, eight, nine, ten, or more) adjuvant polypeptides (e.g., nucleic acid that drives expression of one or more adjuvant polypeptides). For example, an adenovirus vector can include a nucleic acid sequence encoding one or more polypeptides that can enhance an immune response within a mammal. In some cases, an adjuvant polypeptide can be a cytokine. In some cases, an adjuvant polypeptide can be an immune stimulator. In some cases, an adjuvant polypeptide can be a toxin. In some cases, an adjuvant polypeptide can accelerate a systemic T cell response against a pathogen present within a mammal. In some cases, an adjuvant polypeptide can increase a concentration of antibodies against a pathogen at a site where the pathogen can enter a mammal's body. For example, an adjuvant polypeptide can increase a concentration of antibodies against a virus (e.g., a coronavirus) at a mucosal site where the virus can enter a mammal's body. Examples of adjuvant polypeptides that can be encoded by an adenovirus vectors encoding one or more immunogens described herein include, without limitation, granulocyte-macrophage colony-stimulating factor (GM-CSF) polypeptides, interleukin 4 (IL-4) polypeptides, interleukin 21 (IL-21) polypeptides, CD40 ligand (CD40L) polypeptides, 4-1BB ligand (4-1BBL) polypeptides, transforming growth factor beta (TGF-β) polypeptides, C. difficile toxin polypeptides (e.g., C. difficile TcdA polypeptides (see, e.g., SEQ ID NO:22), C. difficile TcdB polypeptides (see, e.g., SEQ ID NO:23), and/or the amino acid sequence set forth in SEQ ID NO:10 (see, e.g., Example 5)), and influenza polypeptides (e.g. N polypeptides, H polypeptides, M polypeptides, the amino acid sequence set forth in SEQ ID NO:20 (see, e.g., Example 5), and/or the amino acid sequence set forth in SEQ ID NO:21 (see, e.g., Example 5)). In some cases, an adjuvant polypeptide (e.g., SEQ ID NO:22) can be preceded by an AAT secretory sequence (e.g., MPSSVSWGILLLAGLCCLVPVSLAEDP; SEQ ID NO:28). In some cases, a nucleic acid sequence encoding an adjuvant polypeptide (e.g., SEQ ID NO:23) can be preceded by a cleavage site such as a synthetic furin cleavage site (e.g., RGRRSRGRRS; SEQ ID NO:29). Examples of nucleic acid sequences that can encoding an adjuvant polypeptide described herein include, without limitation, the nucleic acid sequence set forth in SEQ ID NO:24 (see, e.g., Example 5) and the nucleic acid sequence set forth in SEQ ID NO:25 (see, e.g., Example 5). In some cases, a nucleic acid sequence encoding an adjuvant polypeptide (e.g., SEQ ID NO:24) can be preceded by an AAT secretory sequence (e.g., ATGCCTTCATCCGTGTCATGGGGAATCCTGCTGCTGGCTGGACTGTGCTGTCTGGT GCCTGTCTCACTGGCCGAGGACCCT; SEQ ID NO:40). In some cases, a nucleic acid sequence encoding an adjuvant polypeptide (e.g., SEQ ID NO:25) can be preceded by a cleavage site such as a synthetic furin cleavage site (e.g., AGAGGACGGAGATCAAGAGGAAGGCGCAGC; SEQ ID NO:41). An adjuvant polypeptide can be a full-length polypeptide or a fragment of an adjuvant polypeptide described herein provided that the fragment has the ability to enhance an immune response (e.g., a biologically active fragment). In some cases, an adjuvant polypeptide can be as described elsewhere (see, e.g., Matchett et al., Vaccines, 8(1):64 (2020)).

[0083] In some cases, an adenovirus vector provided herein (e.g., an adenovirus vector encoding one or more immunogens) can encode (e.g., can be designed to encode) a polypeptide that includes an immunogen fused to an adjuvant polypeptide. For example, a nucleic acid sequence encoding an immunogen can be fused to a nucleic acid sequence encoding an adjuvant polypeptide (e.g., such that the encoded immunogen is fused to the encoded adjuvant polypeptide). An example of an immunogen fused to an adjuvant polypeptide that can be encoded by an adenovirus vectors encoding one or more immunogens described herein include, without limitation, the amino acid sequence set forth in SEQ ID NO:5 (see, e.g., Example 5).

[0084] In some cases, an adenovirus vector provided herein (e.g., an adenovirus vector encoding one or more immunogens) can include a nucleic acid sequence encoding one or more (e.g., one, two, three, four, five, six, seven, eight, nine, ten, or more) chaff polypeptides (e.g., nucleic acid that drives expression of one or more chaff polypeptides). A chaff polypeptide can be a full-length polypeptide or a fragment thereof provided that it reduces the rate of entry or inhibits entry of a pathogen into a cell within a mammal. In some cases, a chaff polypeptide can be a soluble polypeptide. For example, a soluble chaff polypeptide can be a full-length chaff polypeptide or a fragment of a chaff polypeptide that lacks a transmembrane domain. For example, a soluble chaff polypeptide can include an ectodomain of a chaff polypeptide. In some cases, a chaff polypeptide can target (e.g., target and bind to) a particular pathogen (e.g., a virus such as a coronavirus) to reduce the rate of entry or inhibit entry of the pathogen into a cell within a mammal. In some cases, a chaff polypeptide can target (e.g., target and bind to) two, three, four, five, six, or more different pathogens. In some cases, a chaff polypeptide can include one or more mutations (e.g., inactivating mutations). Examples of chaff polypeptides that can be encoded by an adenovirus vectors encoding one or more immunogens described herein include, without limitation, full-length ACE2 polypeptides and fragments thereof, full-length CD13 polypeptides and fragments thereof, full-length CEACAM1 polypeptides and fragments thereof, full-length sialydated polypeptides and fragments thereof, full-length CD46 polypeptides and fragments thereof, full-length nestin polypeptides and fragments thereof, the amino acid sequence set forth in SEQ ID NO:8 (see, e.g., Example 5), and the amino acid sequence set forth in SEQ ID NO:9 (see, e.g., Example 5).

[0085] In some cases, an adenovirus vector provided herein (e.g., an adenovirus vector encoding one or more immunogens) can encode (e.g., can be designed to encode) a polypeptide that includes an immunogen fused to a chaff polypeptide. For example, a nucleic acid sequence encoding an immunogen can include a nucleic acid sequence encoding a chaff polypeptide (e.g., such that the encoded immunogen is fused to the encoded chaff polypeptide).

[0086] In some cases, an adenovirus vector provided herein (e.g., an adenovirus vector encoding one or more immunogens) can include a nucleic acid sequence encoding one or more (e.g., one, two, three, four, five, six, seven, eight, nine, ten, or more) marker polypeptides (e.g., nucleic acid that drives expression of one or more marker polypeptides). Examples of marker polypeptides that can be encoded by an adenovirus vector encoding one or more immunogens described herein include, without limitation, fluorescent polypeptides (e.g., GFP, RFP, CFP, and YFP), streptavidin polypeptides, Cre recombinase polypeptides, Cas polypeptides, luciferase polypeptides, betagalactosidase polypeptides, and sodium iodide symporter polypeptides.

[0087] In some cases, an adenovirus vector provided herein (e.g., an adenovirus vector encoding one or more immunogens) can include a nucleic acid sequence encoding one or more (e.g., one, two, three, four, five, six, seven, eight, nine, ten, or more) polypeptides that can form a multimer (e.g., nucleic acid that drives expression of one or more polypeptides that can form a multimer). Examples of polypeptides that can form a multimer that can be encoded by an adenovirus vectors encoding one or more immunogens described herein include, without limitation, immunoglobulin constant region polypeptides (e.g., an Ig polypeptide), streptavidin polypeptides, and sigma coil polypeptides.

[0088] In some cases, an adenovirus vector provided herein (e.g., an adenovirus vector encoding one or more immunogens) can encode (e.g., can be designed to encode) a polypeptide that includes an immunogen fused to a polypeptide that can form a multimer. For example, a nucleic acid sequence encoding an immunogen can include a nucleic acid sequence encoding a polypeptide that can form a multimer (e.g., such that the encoded immunogen is fused to the encoded polypeptide that can form a multimer). Examples of immunogens fused to a polypeptide that can form a multimer that can be encoded by an adenovirus vectors encoding one or more immunogens described herein include, without limitation, the amino acid sequence set forth in SEQ ID NO:5 (see, e.g., Example 5), the amino acid sequence set forth in SEQ ID NO:6 (see, e.g., Example 5), and the amino acid sequence set forth in SEQ ID NO:7 (see, e.g., Example 5).

[0089] In some cases, an adenovirus vector provided herein (e.g., an adenovirus vector encoding one or more immunogens) can have a genome that is at least 85% percent identical (e.g., at least 88% sequence identical, at least 90% sequence identical, at least 93% sequence identical, at least 95% sequence identical, at least 97% sequence identical, at least 98% sequence identical, or at least 99% sequence identical) to a sequence set forth in any one of SEQ ID NOs:28-39. For example, an adenovirus vector provided herein can have a genome that comprising, consisting of, or consisting essentially of the nucleic acid sequence set forth in SEQ ID NO:28 (see, e.g., Example 5). For example, an adenovirus vector provided herein can have a genome that comprising, consisting of, or consisting essentially of the nucleic acid sequence set forth in SEQ ID NO:29 (see, e.g., Example 5). For example, an adenovirus vector provided herein can have a genome that comprising, consisting of, or consisting essentially of the nucleic acid sequence set forth in SEQ ID NO:30 (see, e.g., Example 5). For example, an adenovirus vector provided herein can have a genome that comprising, consisting of, or consisting essentially of the nucleic acid sequence set forth in SEQ ID NO:31 (see, e.g., Example 5). For example, an adenovirus vector provided herein can have a genome that comprising, consisting of, or consisting essentially of the nucleic acid sequence set forth in SEQ ID NO:32 (see, e.g., Example 5). For example, an adenovirus vector provided herein can have a genome that comprising, consisting of, or consisting essentially of the nucleic acid sequence set forth in SEQ ID NO:33 (see, e.g., Example 5). For example, an adenovirus vector provided herein can have a genome that comprising, consisting of, or consisting essentially of the nucleic acid sequence set forth in SEQ ID NO:34 (see, e.g., Example 5). For example, an adenovirus vector provided herein can have a genome that comprising, consisting of, or consisting essentially of the nucleic acid sequence set forth in SEQ ID NO:35 (see, e.g., Example 5). For example, an adenovirus vector provided herein can have a genome that comprising, consisting of, or consisting essentially of the nucleic acid sequence set forth in SEQ ID NO:36 (see, e.g., Example 5). For example, an adenovirus vector provided herein can have a genome that comprising, consisting of, or consisting essentially of the nucleic acid sequence set forth in SEQ ID NO:37 (see, e.g., Example 5). For example, an adenovirus vector provided herein can have a genome that comprising, consisting of, or consisting essentially of the nucleic acid sequence set forth in SEQ ID NO:38 (see, e.g., Example 5). For example, an adenovirus vector provided herein can have a genome that comprising, consisting of, or consisting essentially of the nucleic acid sequence set forth in SEQ ID NO:39 (see, e.g., Example 5).

[0090] In some cases, an adenovirus vector provided herein (e.g., an adenovirus vector encoding one or more immunogens) can have a genome that includes one or more of the coding regions set forth in any one of SEQ ID NOs:28-39. For example, a SC-Ad can be designed to have a genome where all the encoded polypeptides of the SC-Ad have the same amino acid sequence as those polypeptides encoded by the nucleic acid set forth in any one of SEQ ID NOs:28-39.

[0091] This document also provides nucleic acid molecules that can encode an adenovirus vector provided herein (e.g., an adenovirus vector encoding one or more immunogens such as a SC-Ad described herein). The term “nucleic acid” as used herein encompasses both RNA and DNA, including cDNA, genomic DNA, and synthetic (e.g., chemically synthesized) DNA. A nucleic acid can be double-stranded or single-stranded. A single-stranded nucleic acid can be the sense strand or the antisense strand. In addition, a nucleic acid can be circular or linear.

[0092] This document also provides cells (e.g., cell lines) containing adenovirus vectors described herein (e.g., adenovirus vectors encoding one or more immunogens such as SC-Ads described herein). In cases where an adenovirus vector lacks all or a portion of at least of one adenovirus sequences, the cells containing the adenovirus vector can provide the missing adenovirus polypeptide. For example, when the adenovirus is designed to lack nucleic acid encoding the adenovirus fiber polypeptide, an adenovirus fiber polypeptide-expressing cell line can be used to generate the adenovirus such that the adenovirus contains the fiber polypeptide (e.g., the wild-type fiber polypeptide) while lacking the nucleic acid that encodes the fiber polypeptide (e.g., the wild-type fiber polypeptide). For example, when the adenovirus is designed to lack nucleic acid encoding the V polypeptide, an adenovirus V polypeptide-expressing cell line can be used to generate the adenovirus such that the adenovirus contains the V polypeptide (e.g., the wild-type V polypeptide) while lacking the nucleic acid that encodes the V polypeptide (e.g., the wild-type V polypeptide). For example, when the adenovirus is designed to lack nucleic acid encoding the pIIIa polypeptide, an adenovirus pIIIa polypeptide-expressing cell line can be used to generate the adenovirus such that the adenovirus contains the pIIIa polypeptide (e.g., the wild-type pIIIa polypeptide) while lacking the nucleic acid that encodes the pIIIa polypeptide (e.g., the wild-type pIIIa polypeptide). In some cases, cells containing adenovirus vectors described herein can increase the available number of copies of that virus by at least 100-fold (e.g., by 100-fold to 15,000-fold, by 500- to 10,000-fold, by 5,000- to 10,000-fold, or by 5,000- to 15,000-fold). A virus can be expanded until a desired concentration is obtained in standard cell culture media (e.g., DMEM or RPMI-1640 supplemented with 5-10% fetal bovine serum at 37° C. in 5% CO₂). A viral titer typically is assayed by inoculating cells (e.g., A549 or 293 cells) in culture or by quantitating viral genomes by optical density or real-time PCR. In some cases, cells containing an adenovirus vector provided herein can be used to propagate the adenovirus vector (e.g., to establish a stock of the adenovirus vector). For example, a stock of the adenovirus vector can be produced by growth in mammalian cells. In some cases, a stock of the adenovirus vector can be aliquoted and frozen, and can be stored at -70° C. to −80° C. (e.g., at concentrations higher than the therapeutically effective dose). In some cases, a stock of the adenovirus vector can be stored in a stabilizing solution. Examples of stabilizing solutions include, without limitation, sugars (e.g., trehalose, dextrose, and glucose), amino acids, glycerol, gelatin, monosodium glutamate, Ca²⁺, and Mg²⁺.

[0093] In some cases, adenovirus vectors described herein encoding one or more immunogens (and/or nucleic acid molecules that can encode an adenovirus vector described herein encoding one or more immunogens) can be formulated into a composition (e.g., a pharmaceutical composition such as a vaccine composition) for administration to a mammal. For example, adenovirus vectors described herein encoding one or more immunogens (and/or nucleic acid molecules that can encode an adenovirus vector described herein encoding one or more immunogens) can be formulated together with one or more pharmaceutically acceptable carriers (additives), excipients, and/or diluents. Examples of pharmaceutically acceptable carriers, excipients, and diluents that can be used in a composition described herein include, without limitation, sucrose, lactose, starch (e.g., starch glycolate), cellulose, cellulose derivatives (e.g., modified celluloses such as microcrystalline cellulose, and cellulose ethers like hydroxypropyl cellulose (HPC) and cellulose ether hydroxypropyl methylcellulose (HPMC)), xylitol, sorbitol, mannitol, gelatin, polymers (e.g., polyvinylpyrrolidone (PVP), polyethylene glycol (PEG), crosslinked polyvinylpyrrolidone (crospovidone), carboxymethyl cellulose, polyethylene-polyoxypropylene-block polymers, and crosslinked sodium carboxymethyl cellulose (croscarmellose sodium)), titanium oxide, azo dyes, silica gel, fumed silica, talc, magnesium carbonate, vegetable stearin, magnesium stearate, aluminum stearate, stearic acid, antioxidants (e.g., vitamin A, vitamin E, vitamin C, retinyl palmitate, and selenium), citric acid, sodium citrate, parabens (e.g., methyl paraben and propyl paraben), petrolatum, dimethyl sulfoxide, mineral oil, serum proteins (e.g., human serum albumin), glycine, sorbic acid, potassium sorbate, water, salts or electrolytes (e.g., saline, protamine sulfate, disodium hydrogen phosphate, potassium hydrogen phosphate, sodium chloride, and zinc salts), colloidal silica, magnesium trisilicate, polyacrylates, waxes, wool fat, lecithin, and corn oil. Suitable pharmaceutical formulations depend in part upon the use and the route of administration. Such forms should not prevent the composition or formulation from reaching target cells or from exerting its effect. For example, pharmacological compositions injected into the blood stream should be soluble.

[0094] In some cases, a composition including adenovirus vectors described herein encoding one or more immunogens (and/or nucleic acid molecules that can encode an adenovirus vector described herein encoding one or more immunogens) can include a plurality of identical adenovirus vectors that are designed to include one or more immunogens (and/or nucleic acid molecules that can encode an adenovirus vector described herein encoding one or more immunogens).

[0095] In some cases, a composition including adenovirus vectors described herein encoding one or more immunogens (and/or nucleic acid molecules that can encode an adenovirus vector described herein encoding one or more immunogens) can include a population of two or more (e.g., two, three, four, five, or more) different adenovirus vectors. For example, a composition can be designed to include two populations of adenovirus vectors, with the first population containing one or more coronavirus immunogens (e.g., an amino acid sequence set forth in any one of SEQ ID NOs:1-4, 42-44, 47, and 48) and the second population containing one or more adjuvant polypeptides (e.g., a GM-CSF polypeptide, an IL-4 polypeptide, an IL-21 polypeptide, a CD40L polypeptide, a 4-1BBL polypeptide, a TGF-β polypeptide, a C domicile TcdA polypeptide, a C. difficile TcdB polypeptide, and/or biologically active fragments thereof). For example, a composition can be designed to include two populations of adenovirus vectors, with the first population containing one or more coronavirus immunogens (e.g., an amino acid sequence set forth in any one of SEQ ID NOs:1-4, 42-44, 47, and 48) and the second population containing a chaff polypeptide (e.g., a fragment of an ACE2 polypeptide).

[0096] In some cases, a composition including adenovirus vectors described herein encoding one or more immunogens (and/or nucleic acid molecules that can encode an adenovirus vector described herein encoding one or more immunogens) can be designed to include populations of different adenovirus vectors where each population of adenovirus vectors of the composition contains a single immunogen (and/or nucleic acid molecules that can encode an adenovirus vector described herein encoding a single immunogen). For example, a composition of adenovirus vectors can be designed to include a first population of adenovirus vectors having a first coronavirus immunogen (e.g., an amino acid sequence set forth in any one of SEQ ID NOs:1-4, 42-44, 47, and 48) and a second population of adenovirus vectors having a second coronavirus immunogen (e.g., an amino acid sequence set forth in any one of SEQ ID NOs:1-4, 42-44, 47, and 48). For example, a composition of adenovirus vectors can be designed to include a first population of adenovirus vectors having a first coronavirus immunogen (e.g., an amino acid sequence set forth in any one of SEQ ID NOs:1-4, 42-44, 47, and 48), a second population of adenovirus vectors having a second coronavirus immunogen (e.g., an amino acid sequence set forth in any one of SEQ ID NOs:1-4, 42-44, 47, and 48), and a third population of adenovirus vectors having a third coronavirus immunogen (e.g., an amino acid sequence set forth in any one of SEQ ID NOs:1-4, 42-44, 47, and 48). In another example, a composition of adenovirus vectors can be designed to include a first population of adenovirus vectors having a first coronavirus immunogen (e.g., an amino acid sequence set forth in any one of SEQ ID NOs:1-4, 42-44, 47, and 48), a second population of adenovirus vectors having a second coronavirus immunogen (e.g., an amino acid sequence set forth in any one of SEQ ID NOs:1-4, 42-44, 47, and 48), and a third population of adenovirus vectors an adjuvant polypeptide (e.g., a GM-CSF polypeptide, an IL-4 polypeptide, an IL-21 polypeptide, a CD40L polypeptide, a 4-1BBL polypeptide, a TGF-β polypeptide, a C domicile TcdA polypeptide, a C. difficile TcdB polypeptide, and/or biologically active fragments thereof). a first population of adenovirus vectors having a first coronavirus immunogen (e.g., an amino acid sequence set forth in any one of SEQ ID NOs:1-4, 42-44, 47, and 48), a second population of adenovirus vectors having a second coronavirus immunogen (e.g., an amino acid sequence set forth in any one of SEQ ID NOs:1-4, 42-44, 47, and 48), and a third population of adenovirus vectors having a chaff polypeptide (e.g., a fragment of an ACE2 polypeptide).

[0097] This document also provides methods for using adenovirus vectors described herein (e.g., adenovirus vectors encoding one or more immunogens) and/or nucleic acid molecules that can encode an adenovirus vector described herein. In some cases, adenovirus vectors described herein and/or nucleic acid molecules that can encode an adenovirus vector described herein can be administered to a mammal (e.g., a human) to increase an immune response (e.g., an increased antibody response and/or an increased T cell response) against a pathogen (e.g., a bacterial or a viral pathogen associated with an immunogen encoded by the adenovirus vectors). For example, adenovirus vectors described herein encoding one or more immunogens (and/or nucleic acid molecules that can encode an adenovirus vector described herein encoding one or more immunogens) can be administered to a mammal to provide the mammal with an immune response effective to reduce the severity of an infection caused by a pathogen associated with the immunogen(s) encoded by the adenovirus vectors. In some cases, adenovirus vectors described herein encoding one or more immunogens (and/or nucleic acid molecules that can encode an adenovirus vector encoding one or more immunogens) can be administered to a mammal as described herein to provide the mammal with an immune response effective to prevent the mammal from exhibiting symptoms of an infection caused by a pathogen associated with the immunogen(s) encoded by the adenovirus vectors. In some cases, adenovirus vectors described herein and/or nucleic acid molecules that can encode an adenovirus vector described herein can be administered to a mammal (e.g., a human) to increase a B cell response within the mammal. For example, adenovirus vectors described herein encoding one or more immunogens (and/or nucleic acid molecules that can encode an adenovirus vector described herein encoding one or more immunogens) can be administered to a mammal as described herein to increase the number of activated B cells (e.g., plasmablasts, plasma cells, and memory B cells) within the mammal by, for example, 10, 20, 30, 40, 50, 60, 70, 80, 90, 95, or more percent.

[0098] In some cases, adenovirus vectors described herein and/or nucleic acid molecules that can encode an adenovirus vector described herein can be administered to a mammal (e.g., a human) to increase a number of antibodies (e.g., antibodies against a pathogen such as a bacterial or a viral pathogen associated with the immunogen(s) encoded by the adenovirus vectors) within the mammal. For example, adenovirus vectors described herein encoding one or more immunogens (and/or nucleic acid molecules that can encode an adenovirus vector described herein encoding one or more immunogens) can be administered to a mammal as described herein to increase the number of antibodies within the mammal by, for example, 10, 20, 30, 40, 50, 60, 70, 80, 90, 95, or more percent. In some cases, adenovirus vectors described herein and/or nucleic acid molecules that can encode an adenovirus vector described herein can be administered to a mammal as described herein to produce antibodies against the immunogen(s) within the mammal for, for example, about one week (e.g., from about 1 to about 7 days, from about 1 to about 6 days, from about 1 to about 5 days, from about 1 to about 4 days, from about 1 to about 3 days, from about 2 to about 7 days, from about 3 to about 7 days, from about 4 to about 7 days, from about 5 to about 7 days, from about 2 to about 6 days, from about 3 to about 5 days, from about 2 to about 4 days, from about 3 to about 5 days, or from about 4 to about 6 days).

[0099] In some cases, adenovirus vectors described herein and/or nucleic acid molecules that can encode an adenovirus vector described herein can be administered to a mammal (e.g., a human) to increase a T cell response within the mammal. For example, adenovirus vectors described herein encoding one or more immunogens (and/or nucleic acid molecules that can encode an adenovirus vector described herein encoding one or more immunogens) can be administered to a mammal as described herein to increase the number of activated T cells (e.g., cytotoxic T cells and macrophages) within the mammal by, for example, 10, 20, 30, 40, 50, 60, 70, 80, 90, 95, or more percent.

[0100] Adenovirus vectors described herein (e.g., adenovirus vectors encoding one or more immunogens) and/or nucleic acid molecules that can encode an adenovirus vector described herein can be administered to any appropriate mammal (e.g., to increase an immune response against a pathogen such as a bacterial or a viral pathogen associated with the immunogen(s) encoded by the adenovirus vectors within that mammal). In some cases, the mammal can be a mammal that has not had a previous infection with a pathogen associated with an immunogen encoded by an adenovirus vector provided herein. In some cases, the mammal can be a mammal that has had a previous infection with a pathogen closely related (e.g., genetically related) to a pathogen associated with an immunogen encoded by an adenovirus vector provided herein. In some cases, the mammal can be a mammal that has an infection (e.g., an ongoing infection) with a pathogen associated with an immunogen encoded by an adenovirus vector provided herein. Examples of mammals that can be administered adenovirus vectors described herein encoding one or more immunogens (and/or nucleic acid molecules that can encode an adenovirus vector described herein encoding one or more immunogens) include, without limitation, humans, non-human primates such as monkeys, dogs, cats, horses, cows, pigs, sheep, mice, rats, rabbits, hamsters, bats, raccoons, and ferrets. In some cases, the methods and materials described herein can be applied to an avian species instead of a mammal. For example, the methods and materials described herein for treating a mammal can be applied to chickens and turkeys. In some cases, the methods and materials described herein can be applied to a species of reptile instead of a mammal. In some cases, the methods and materials described herein can be applied to a species amphibian of instead of a mammal. In some cases, the methods and materials described herein can be applied to a species of fish instead of a mammal. In some cases, a human can be administered one or more adenovirus vectors described herein and/or nucleic acid molecules that can encode an adenovirus vector described herein to increase an immune response against a pathogen (e.g., a bacterial or a viral pathogen associated with an immunogen encoded by the adenovirus vectors).

[0101] When administering adenovirus vectors described herein (e.g., adenovirus vectors encoding one or more immunogens) and/or nucleic acid molecules that can encode an adenovirus vector described herein (e.g., a composition such as a vaccine composition including adenovirus vectors described herein and/or nucleic acid molecules that can encode an adenovirus vector described herein), any appropriate route of administration can be used. For example, a composition (e.g., a vaccine composition) provided herein can be administered to a mammal (e.g., a human) orally (e.g., sublingually) or parenterally (including, without limitation, intranasally, subcutaneously, intramuscularly, intravenously, intradermally, intra-cerebrally, intrathecally, or intraperitoneally). In some cases, the route and/or mode of administration of a composition (e.g., a vaccine composition) provided herein can be adjusted for the mammal being treated. In some cases, adenovirus vectors described herein and/or nucleic acid molecules that can encode an adenovirus vector described herein can be administered to a mammal via mucosal delivery. In some cases, adenovirus vectors described herein and/or nucleic acid molecules that can encode an adenovirus vector described herein can be administered to a mammal as described elsewhere (see, e.g., Weaver et al. PLOS ONE, 8(7):e67574 (2013)).

[0102] Adenovirus vectors described herein (e.g., adenovirus vectors encoding one or more immunogens) and/or nucleic acid molecules that can encode an adenovirus vector described herein (e.g., a composition such as a vaccine composition including adenovirus vectors provided herein and/or nucleic acid molecules that can encode an adenovirus vector provided herein) can be administered to a mammal (e.g., a human) in any appropriate amount (e.g., any appropriate dose). Effective amounts can vary depending on the route of administration, the age and general health condition of the subject, excipient usage, the possibility of co-usage with other therapeutic treatments such as use of other agents, and the judgment of the treating physician. An effective amount of a composition containing adenovirus vectors encoding one or more immunogens (and/or nucleic acid molecules that can encode an adenovirus vector encoding one or more immunogens) can be any amount that can induce an immune response in a mammal as described herein without producing significant toxicity to the mammal. For example, an effective amount adenovirus vectors encoding one or more immunogens can be, for example, from about 10⁸ viral particles (vp) to about 10¹⁴ vp (e.g., from about 10⁸ vp to about 10¹³ vp, from about 10⁸ vp to about 10¹² vp, from about 10⁸ vp to about 10¹¹ vp, from about 10⁸ vp to about 10¹⁰ vp, from about 10⁸ vp to about 10⁹ vp, from about 10⁹ vp to about 10¹⁴ vp, from about 10¹⁰ vp to about 10¹⁴ vp, from about 10¹¹ vp to about 10¹⁴ vp, from about 10¹² vp to about 10¹⁴ vp, from about 10¹³ vp to about 10¹⁴ vp, from about 10⁹ vp to about 10¹³ vp, from about 10¹⁰ vp to about 10¹² vp, from about 10⁹ vp to about 10¹¹ vp, from about 10¹⁰ vp to about 10¹² vp, or from about 10¹ vp to about 10¹³ vp). The effective amount can remain constant or can be adjusted as a sliding scale or variable dose depending on the mammal's response to treatment. Various factors can influence the actual effective amount used for a particular application. For example, the frequency of administration, duration of treatment, use of multiple treatment agents, and/or route of administration may require an increase or decrease in the actual effective amount administered.

[0103] Adenovirus vectors provided herein (e.g., adenovirus vectors encoding one or more immunogens) and/or nucleic acid molecules that can encode an adenovirus vector provided herein (e.g., a composition such as a vaccine composition including adenovirus vectors provided herein and/or nucleic acid molecules that can encode an adenovirus vector provided herein) can be administered to a mammal (e.g., a human) in any appropriate frequency. The frequency of administration can be any frequency that can induce an immune response in a mammal without producing significant toxicity to the mammal. In some cases, adenovirus vectors provided herein and/or nucleic acid molecules that can encode an adenovirus vector provided herein can be administered to a mammal once (e.g., in a single administration). In some cases, adenovirus vectors provided herein and/or nucleic acid molecules that can encode an adenovirus vector provided herein can be administered to a mammal several times (e.g., as several administrations). For example, the frequency of administration can be from about once a day to about every three days, from about once a day to about once a week, from about once a week to about every 3 weeks, or from about once a week to about every 6 weeks. The frequency of administration can remain constant or can be variable during the duration of treatment. As with the effective amount, various factors can influence the actual frequency of administration used for a particular application. For example, the effective amount, duration of treatment, use of multiple treatment agents, and/or route of administration may require an increase or decrease in administration frequency.

[0104] Adenovirus vectors provided herein (e.g., adenovirus vectors encoding one or more immunogens) and/or nucleic acid molecules that can encode an adenovirus vector provided herein (e.g., a composition such as a vaccine composition including adenovirus vectors provided herein and/or nucleic acid molecules that can encode an adenovirus vector provided herein) can be administered to a mammal (e.g., a human) for any appropriate duration. An effective duration for administering or using a composition containing adenovirus vectors encoding one or more immunogens (and/or nucleic acid molecules that can encode an adenovirus vector encoding one or more immunogens) can be any duration that can induce an immune response in a mammal without producing significant toxicity to the mammal. For example, the effective duration can vary from a couple of days to one week, from several days to several weeks, or from a few days to a month. Multiple factors can influence the actual effective duration used for a particular treatment. For example, an effective duration can vary with the frequency of administration, effective amount, use of multiple treatment agents, and/or route of administration.

[0105] In some cases, an adenovirus vector provided herein (e.g., an adenovirus vector encoding one or more immunogens) and/or a nucleic acid molecule that can encode an adenovirus vector provided herein (e.g., a composition such as a vaccine composition including adenovirus vectors provided herein and/or nucleic acid molecules that can encode an adenovirus vector provided herein) can be administered to a mammal (e.g., a human) at an effective amount one, two, or three times with one week to four weeks between each administration when more than one administration is used.

[0106] In some cases, one or more adenovirus vectors provided herein (e.g., an adenovirus vector encoding one or more immunogens) and/or a nucleic acid molecule that can encode an adenovirus vector provided herein (e.g., a composition such as a vaccine composition including adenovirus vectors provided herein and/or nucleic acid molecules that can encode an adenovirus vector provided herein) can be administered to a mammal (e.g., a human) as the sole active ingredient to increase an immune response (e.g., an increased antibody response and/or an increased T cell response) against a pathogen (e.g., a bacterial or a viral pathogen associated with an immunogen encoded by the adenovirus vectors). For example, a composition containing adenovirus vectors described herein encoding one or more coronavirus immunogens (and/or nucleic acid molecules that can encode an adenovirus vector described herein encoding one or more coronavirus immunogens) can be administered to a mammal (e.g., a human) as the sole active ingredient to increase an immune response (e.g., an increased antibody response and/or an increased T cell response) against a coronavirus.

[0107] In some cases, one or more adenovirus vectors provided herein (e.g., an adenovirus vector encoding one or more immunogens) and/or a nucleic acid molecule that can encode an adenovirus vector provided herein (e.g., a composition such as a vaccine composition including adenovirus vectors provided herein and/or nucleic acid molecules that can encode an adenovirus vector provided herein) can be administered to a mammal (e.g., a human) together with one or more (e.g., one, two, three, four, five or more) additional agents/therapies used to increase an immune response (e.g., an increased antibody response and/or an increased T cell response) against a pathogen (e.g., a bacterial or a viral pathogen associated with an immunogen encoded by the adenovirus vectors). For example, a composition containing adenovirus vectors described herein encoding one or more coronavirus immunogens (and/or nucleic acid molecules that can encode an adenovirus vector described herein encoding one or more coronavirus immunogens) can be administered to a mammal (e.g., a human) together with one or more (e.g., one, two, three, four, five or more) additional agents/therapies used to increase an immune response (e.g., an increased antibody response and/or an increased T cell response) against a coronavirus. In cases where one or more adenovirus vectors provided herein (e.g., an adenovirus vector encoding one or more immunogens) and/or a nucleic acid molecule that can encode an adenovirus vector provided herein (e.g., a composition such as a vaccine composition including adenovirus vectors provided herein and/or nucleic acid molecules that can encode an adenovirus vector provided herein) are used in combination with one or more additional agents/therapies used to increase an immune response (e.g., an increased antibody response and/or an increased T cell response), the one or more adenovirus vectors provided herein (and/or a nucleic acid molecule that can encode an adenovirus vector provided herein) and the one or more additional agents/therapies can be administered at the same time (e.g., in a single composition) or independently. For example, one or more adenovirus vectors provided herein (and/or a nucleic acid molecule that can encode an adenovirus vector provided herein) can be administered first, and the one or more additional agents/therapies administered second, or vice versa.

[0108] The invention will be further described in the following examples, which do not limit the scope of the invention described in the claims.

### EXAMPLES

### Example 1: A Replicating Single-Cycle Adenovirus Vaccine Against Clostridium difficile

[0109] Clostridium difficile causes nearly 500,000 infections and nearly 30,000 deaths each year in the U.S. and costs up to $4.8 billion per year. C. difficile infection (CDI) arises from bacteria colonizing the large intestine and releasing its two toxins, Toxin A (TcdA) and Toxin B (TcdB). This example describes a SC-Ad gene-based vaccine against C. difficile.

### Results

[0110] Single-Cycle Adenovirus Expressing C. difficile Toxins A and B Fusion Protein.

[0111] A SC-Ad-TcdA/B vector was generated using adenovirus type 6 (Ad6) (FIG. 1). This vector carries a mammalian codon-optimized cDNA that expresses a fusion protein consisting of a secretory leader and the RBDs of TcdA and B separated by two furin cleavage sites. The toxin RBDs were derived from the strain VPI 10463 (toxinotype 0) with glutamine for the asparagine substitutions in putative n-linked glycosylation sites. This resulted in a total of eight substitutions in the TcdA RBD and three alterations within the TcdB RBD sequences. Human lung A549 cells were infected with SC-Ad6-TcdA/B and cell supernatants and lysates were analyzed by western blot using antibodies specific for TcdA and TcdB. The fusion protein was predicted to be 160 kDa with the RBDs of TcdA and TcdB expected to be 100 and 60 kDa, respectively. Under these conditions, both RBDs and the fusion protein were observed in cells and in concentrated cell supernatants (FIG. 2).

Single Intramuscular Vaccination with SC-Ad6-TcdA/B Induces Immune Responses in Mice.

[0112] Groups of 10 male and female outbred CD-1 mice were immunized i.m. a single time with PBS or 10¹⁰ virus particles of SC-Ad6-TcdA/B or a negative control vector SC-Ad6-PEB1 that expresses a mismatched protein from another bacterium, Campylobacter jejuni. Serum was harvested 6 weeks after immunization and anti-toxin antibody responses were evaluated by ELISA and in vitro toxin neutralization assays. Single immunization generated significant antibodies against toxin A in the majority of the SC-Ad6-TcdA/B vaccinated animals (FIGS. 3A and 3B). Reciprocal titers were defined as those being significantly higher than levels in PBS control mice; therefore, antibody levels are not shown for the PBS group. Both animal sexes generated antibody responses that were significantly higher than in control mice. Female mice had a geometric mean reciprocal toxin A binding titer of 1,467,329 while males had titers of 397,964 (FIG. 3A). Female binding titers were significantly higher than male titers (p<0.0066 by Mann-Whitney). A similar pattern was observed in the TcdA neutralizing (nAb) titers from the two sexes, with mean titers of 1682 in females and 379 in males (FIG. 3B). However, these differences were not significant (p=0.8004 by Dunn's). When these were compared to animals immunized with SC-Ad6-PEB1, those receiving SC-Ad6-TcdA/B had nAb titers that were significantly higher than their sex matched controls.

Single Intramuscular Vaccination with SC-Ad6-TcdA/B Provides Protection Against Toxin Challenge.

[0113] 8 weeks after single immunization, the mice were challenged with 300 ng (6×LD50) of purified TcdA from List Labs. The recombinant toxin was derived from a Ribotype 087 and Toxinotype 0 strain similar to VPI 10463 antigens in the SC-Ad vaccine. Eight out of ten PBS and PEB1 mice succumbed to the toxin within 24 hours of challenge (FIG. 3C). One additional PBS mouse met sacrifice criteria 3 days later. Seventeen out of the twenty SC-Ad6-TcdA/B vaccinated mice survived the challenge. Log-rank comparison of the Kaplan-Meier survival curves demonstrated that SC-Ad6-TcdA/B vaccinated animals survived significantly better than PBS or PEB1 control animals. The three SC-Ad6-TcdA/B vaccinated mice that did not survive had reduced TcdA binding titers and a complete absence of nAbs (FIGS. 3A and 3B).

SC-Ad6-TcdA/B Provides Protection against Toxin Challenge 38 Weeks after Single Immunization.

[0114] A second set of female CD1 mice were immunized i.m. a single time with 10¹⁰ virus particles of SC-Ad6-TcdA/B, SC-Ad6-PEB1, or PBS (n=5 per group). This single vaccination of SC-Ad6-TcdA/B generated strong antibody responses with reciprocal endpoint binding titers for TcdA and TcdB that climbed above 100,000 over 26 weeks (FIGS. 4A and 4B). At week 26, the average reciprocal TcdB nAb titer in the SC-Ad-TcdA/B group reached 174 (FIG. 4C). At week 38, the mice were challenged with 300 ng (6×LD50) of TcdA. All PBS and control SC-Ad-PEB1 vaccinated animals succumbed to the toxin within 48 hours (FIG. 4D). In contrast, all animals in the SC-Ad C. difficile vaccine group survived.

### Pilot Toxicology and Efficacy Testing in Hamsters.

[0115] Groups of 10 Syrian hamsters were immunized a single time with 10¹¹ virus particles of SC-Ad6-TcdA/B by the i.n. or i.m. route. Control animals received i.n. PBS. Blood was collected 3 days after immunization for clinical chemistry. These revealed no significant differences in blood chemistry (FIG. 7).

Single Intranasal or Intramuscular Vaccination with Sc-Ad6-Tcda/B Induces Immune Responses in Hamsters.

[0116] Serum was collected from the hamsters 6, 12, and 18 weeks after immunization and anti-toxin antibody responses were evaluated. Single immunization with SC-Ad6-TcdA/B generated significant serum nAbs against toxin A regardless of route. These antibody levels increased over the course of the study (FIG. 5A). While i.m. immunization produced higher mean nAbs against toxin A than the i.n. group, these were not significantly different until week 18 (p=0.0336 by Dunn's). Toxin B antibodies were detectable by ELISA at week 6. However, significant levels of nAbs against toxin B took longer to develop (FIG. 5B). All i.m. immunized animals and 6/10 of the i.n. immunized animals had significant toxin B nAb levels by week 12. At week 18, all i.m. and i.n. immunized animals had significant toxin B nAbs with mean reciprocal titers of 2084 and 229, respectively.

Single Intramuscular Vaccination with SC-Ad6-TcdA/B Provides Protection Against C. difficile Spore Challenge in Hamsters.

[0117] CDI can be induced in Syrian hamsters when sensitized with clindamycin. This model mimics the fecal-oral route of transmission by delivering purified C. difficile spores orogastrically producing symptoms similar to those observed in patients with CDI. Various toxin isoforms have been identified within clinical isolates of C. difficile. Recent studies report that the BI/NAP1/027 strain of C. difficile is the most prevalent cause of CDI in North America. Given its clinical relevance and expression of heterologous toxin isoforms, vaccine efficacy was tested using spores from the UK1 (BI/NAP1/027) strain. Hamsters were administered clindamycin intraperitoneally 24 hours before receiving 10,000 spores 20-21 weeks after a single immunization. All of the PBS immunized animals succumbed to the spore challenge (FIG. 5C). Strikingly, all of the SC-Ad6-TcdA/B vaccinated hamsters survived to the end of the study regardless of vaccine administration route. Log-rank comparison of the Kaplan-Meier survival curves demonstrated that both i.n. and i.m. SC-Ad6-TcdA/B vaccinated animals had significantly better survival than PBS control animals. Weight loss was observed in all animals over the course of the experiment, but weight loss in SC-Ad6-TcdA/B animals either stabilized or began to reverse by day 7.

SC-Ad6-TcdA/B Provides Protection Against Lethal Spore Challenge 45 Weeks after Single Immunization.

[0118] A second group of 10 female Syrian hamsters were immunized a single time with 1011 virus particles of SC-Ad6-TcdA/B either i.n. or i.m. or with PBS. Blood was collected 3 or 4 days after immunization and tested using the same analyte panel as before. Similarly, no significant differences were observed between vaccinated and unvaccinated on days 3 or 4 (FIGS. 8A and 8B). At day 4, CBCs were measured in half of the animals. There were significant increases in the percentage of neutrophils and a corresponding decrease in the percentage of lymphocytes in animals receiving vaccine compared to controls; however, comparison of the number of neutrophil and lymphocyte showed no differences (FIG. 8C). I.m. immunized animals saw increases in their platelets and plateletcrit, although these were still within normal ranges.

[0119] Serum collected at weeks 6, 12, and 18 showed increasing toxin A and B nAbs as in the first vaccination study (FIGS. 6A and 6B). At week 24, half of the hamsters in each group were sensitized with clindamycin given orogastrically (30 mg/kg) and then were challenged with 200 spores of C. difficile 5 days later. This low dose challenge surprisingly induced no symptoms or indications of C. difficile infection in any hamsters including the PBS controls. Serum antibodies collected at the termination of this challenge revealed no increases in toxin A or B antibodies due to the pathogen challenge compared to unchallenged animals in the cohort. The unchallenged animals were followed for an additional 20 weeks. In this period, one PBS and one i.m. immunized animals became moribund and had to be euthanized at week 42 and 44, respectively.

[0120] The remaining animals were challenged at week 45 using the high dose 10,000 spore challenge. All PBS immunized animals met endpoint criteria and were euthanized (FIG. 6C). Two intranasally-immunized animals also succumbed to the challenge. All animals in the i.m. vaccine group survived spore challenge. Log-rank comparison of these survival curves showed significant differences in the survival of both i.n. and i.m. SC-Ad6-TcdA/B vaccinated animals compared to PBS. Toxin nAbs levels before challenge (week 36), correlated with survival in the groups (FIG. 6D). Animals in the i.n. group that survived spore challenge had high toxin nAbs prior to challenge. In contrast, animals in this group that did not survive had lower toxin nAbs before they were challenged. Protection against C. difficile challenge was observed 10 months after only a single immunization with SC-Ad vaccine.

### Materials and Methods

### Cell Culture

[0121] A549 cells and Vero cells were purchased from the American Type Culture Collection. The 293-IIIA cells were generated as described elsewhere (Crosby et al., Virology 462-463:158-165 (2014)). All cells were maintained at 37° C. in Dulbecco's Modified Eagle Medium (DMEM) supplemented with 10% heat inactivated fetal bovine serum (HI-FBS; HyClone) and penicillin/streptomycin at 100 U/mL (Invitrogen).

Single-Cycle Adenovirus Expressing C. difficile TcdA/B Fusion

[0122] A codon-optimized cDNA encoding a novel fusion of the receptor binding domains of C. difficile toxins A and B was synthesized by Genscript. This cDNA contains the secretory leader sequence from alpha-1 antitrypsin (AAT) to facilitate secretion of the fusion protein. The receptor binding domains are separated by two furin cleavage sites to liberate the two Tcds from each other during secretion from mammalian cells. This cDNA was inserted into the shuttle plasmids pAd6-NdePfl and was recombined into SC-Ad6 as described elsewhere (Crosby et al., Virology 462-463:158-165 (2014), Crosby et al., J. Virol. 91(2):e00720-16 (2017); and Crosby et al., J. Virol. 89:669-675 (2015)) to generate SC-Ad6-C. diff. Control SC-Ad6 viruses expressing GFP-Luciferase or Campylobacter jejuni PEB1 were also used. Viruses were rescued, amplified, and purified as described elsewhere (Crosby et al., Virology 462-463:158-165 (2014), Crosby et al., J. Virol. 91(2):e00720-16 (2017); and Crosby et al., J. Virol. 89:669-675 (2015)). Virus comparisons were based on virus particles.

### Western Blotting

[0123] A549 cells were infected with SC-Ad6-TcdA/B or SC-Ad-GL, which expresses GFP-Luciferase, with 10⁴ virus particles/cell. 24 hours after infection, the media was replaced with serum-free DMEM. 24 hours later, this media was collected and concentrated using Amicon Ultra-15 30 k (Millipore). The cells were harvested using Triton-X lysis buffer supplemented with Complete™ Protease Inhibitor Cocktail (Roche). Media concentrates and cell lysates were analyzed by western blot using antibodies against C. difficile toxin A or B (1:1000; List Biological Labs, Inc.) followed by a goat anti-chicken horseradish peroxidase secondary antibody (1:1000; Invitrogen). SuperSignal West Dura (Thermo Scientific) was added and blots were imaged on an In Vivo F Station (KODAK).

### Animals

[0124] Male and female outbred CD-1 mice (Charles River Laboratories) and female Golden Syrian hamsters (Envigo) were housed in the Mayo Clinic Animal Facility. All animal handling and experiments were carried out according to the provisions of the Animal Welfare Act, PHS Animal Welfare Policy, the principles of the NIH Guide for the Care and Use of Laboratory Animals, and the policies and procedures of the Institutional Animal Care and Use Committee at Mayo Clinic.

### Immunizations and Sample Collection

[0125] Mice were anesthetized with isoflurane and immunized by the intramuscular (i.m.) route with 10¹⁰ vp of the indicated vaccine. Hamsters were anesthetized with isoflurane and immunized intramuscularly (i.m.) or intranasally (i.n.) routes with 10¹¹ vp of the vaccine. In mice, serum was collected from the facial vein at the indicated time points. At various time points, hamsters were anesthetized and blood was collected from the jugular vein.

### Enzyme-Linked Immunosorbent Assay (ELISA)

[0126] Immulon 4 HBX plates (Thermo) were coated with 100 ng/well of either C. difficile A or B toxoids (List Biological Labs, Inc.) in 1× phosphate-buffered saline (PBS) overnight. Wells were washed and blocked with 5% milk in Tris-buffered saline with 0.1% Tween 20 (TBST) at room temperature (RT) for 2 hours. After washing with TBST, half log dilutions of each serum sample were plated in triplicate and incubated for 3 hours at RT. Wells were washed and 100 μL of 1:10,000 goat anti-mouse IgG-horseradish peroxidase (Thermo Fisher Scientific Inc.) was added to each well. Plates were incubated for 2 hours at RT. Wells were washed and 50 μL of 1 step Ultra TMB ELISA (Thermo Fisher Scientific Inc.) were added to each well. When color developed, 50 μL of 2M H2504 were added. OD450 was determined with a BioTek Synergy H1 Hybrid Multi-Mode Reader. Reciprocal titers were statistically defined based on 95% confidence interval.

### Cytotoxicity and Neutralization Assays

[0127] Cytotoxicity of C. difficile toxin A and toxin B were determined on Vero cells using the method described elsewhere (Donald et al., Microbiology 159:1254-1266 (2013)). Vero cells were used in place of IMR-90 as they have similar sensitivity to Toxin B compared to IMR-90 cells, but have an increased sensitivity to toxin A. Vero cells were plated at 10⁴ cells per well in a 96 well plate. C. difficile toxin A or toxin B (List Biological Laboratories, Inc) was serially diluted in DMEM supplemented with 10% HI-FBS and added to cells 24 hours after plating. Three days later, cell viability was determined using the bioluminescent CellTiter-Glo reagent (Promega). An EC50 was determined to be equivalent to the amount of toxin causing 50% reduction in luminescence by fitting the data with a four-parameter equation. Toxin neutralization was determined using serial dilutions of mouse or hamster serum mixed with eight times the EC50 value determined in the cytotoxicity assay. The mixtures were incubated at 37° C. for 90 minutes in a humidified incubator (5% CO₂) before being added to Vero cells on 96 well-plates. Three days later, cell viability was determined with Celltiter-Glo. A four-parameter regression response was fitted to the luciferase relative light units (RLU) values derived from the serum dilutions. Neutralizing antibody (nAb) titers were expressed as the derived sample dilution that exhibited a 50% reduction in cytotoxicity. If a serum titration failed to generate 50% inhibition within the range of concentrations tested, a titer value of ½ of the highest serum concentration tested was ascribed to it.

Challenge with Recombinant C. difficile Toxin a in Mice

[0128] Immunized mice were challenged intraperitoneally (i.p.) with 300 ng of C. difficile toxin A (List Biological Laboratories, Inc). Following toxin challenge, mice were monitored every 3 hours for the first 30 hours, followed by monitoring at 6-hour intervals for 72 hours, and then every 12 hours from day 3 through day 7 (168 hours). Mice were monitored for clinical signs. Briefly, animals' symptoms were scored as normal, lethargic, abnormal or moribund. Moribund animals were euthanized immediately and recorded. The survival rate was determined for each treatment group.

### Hematology and Clinical Chemistry in Hamsters

[0129] Blood was collected for clinical chemistry analysis (200 μL into lithium heparin tubes; Greiner Bio-One) and for complete blood count (CBC, 100 μl in K2 EDTA tubes; Greiner Bio-One). Blood chemistry was analyzed with a Piccolo Xpress Analyzer (Abaxis) and CBCs were determined with VetScan HM5 hematology analyzer (Abaxis). Analyte parameters for the two tests are shown in Table 1 and Table 2.

TABLE 1
Veterinary Hematology Parameters Measured on the
Abaxis VetScan HM5 Analyzer Results Table.

| Parameter | Abbreviation | Units |
|---|---|---|
| Sodium | NA+ | mmol/L |
| Potassium | K+ | mmol/L |
| Total Carbon Dioxide | tCO2 | mmol/L |
| Chloride | CL− | mmol/L |
| Glucose | GLU | mg/dL |
| Calcium | CA | mg/dL |
| Blood Urea Nitrogen | BUN | mg/dL |
| Creatinine | CRE | mg/dL |
| Alkaline Phosphatase | ALP | U/L |
| Alanine Aminotransferase | ALT | U/L |
| Aspartate Aminotransferase | AST | U/L |
| Total Bilirubin | TBIL | mg/dL |
| Albumin | ALB | g/dL |
| Total Protein | TP | g/dL |

TABLE 2
Blood Chemistry Parameters Measured on the Piccolo
Xpress Chemistry Analyzer.

| Parameter | Abbreviation | Units |
|---|---|---|
| Total White Blood Cell count | WBC | 10\hat{ }9L |
| Lymphocyte count | LYM | 10\hat{ }9L |
| Monocyte count | MON | 10\hat{ }9L |
| Neutrophil count | NEU | 10\hat{ }9L |
| Eosinophil count | EOS | 10\hat{ }9L |
| Basophil count | BAS | 10\hat{ }9L |
| Lymphocyte percentage | LYM % | % |
| Monocyte percentage | MON % | % |
| Neutrophil percentage | NEU % | % |
| Eosinophil percentage | EOS % | % |
| Basophil percentage | BAS % | % |
| Red Blood Cell count | RBC | 10\hat{ }12L |
| Hemoglobin | HGB | g/dL |
| Hematocrit percentage | HCT | % |
| Mean Corpuscular Volume | MCV | fL |
| Mean Corpuscular Hemoglobin | MCH | pg |
| Mean Corpuscular Hemoglobin | MCHC | g/dl |
| Concentration | | |
| Red Cell Distribution Width, | RDWc | % |
| coefficient of variation % | | |
| Red Cell Distribution Width | RDWs | fL |
| Platelet count | PLT | 10\hat{ }9L |
| Mean Platelet Volume | MPV | fL |
| Platelet crit % | PCT | % |
| Platelet Distribution Width, | PDWc | % |
| coefficient of variation % | | |
| Platelet Distribution Width | PDWs | fL |

Challenge with C. difficile Spores in Hamsters

[0130] Prior to challenge, hamsters were housed individually in ventilated cages. In the low dose challenge, hamsters were sensitized for infection using a clindamycin phosphate (Sigma-Aldrich) antibiotic solution (30 mg/kg of body weight) delivered orogastrically via a feeding needle. Five days later, the hamsters were challenged orogastrically with 200 spores from C. difficle strain UK1. Since low dose spore challenge did not induce symptoms in hamsters in our hands, a high dose challenge with modified clindamycin administration was used. In this challenge, hamsters were sensitized with clindamycin phosphate antibiotic solution (10 mg/kg of body weight) by the intraperitoneal route rather than the orogastric route. The hamsters were then challenged 24 hours later orogastrically with 10⁴ UK1 spores. In both the high and low dose challenge, the hamsters were monitored 4 times per day following infection by assessing them individually in a microbiological safety cabinet for several parameters, including presence and severity of wet tail, loose feces, diarrhea, weight loss, activity level, starey coat, sunken eyes, hunched posture and response to stimulus. A scoring system, based on severity of changes observed (ranging from 0-3 for each parameter), was used to quantify the condition of the animals. Animals were euthanized and considered to have succumbed to disease when they either reached a score were moribund, or suffered weight loss in excess of 20%.

### Statistical Analysis

[0131] Prism 8 Graphical software was used for all statistical analyses.

### Example 2: Single-Cycle Adenovirus Vectors Expressing a SARS-CoV-2 Polypeptide

[0132] A full-length codon-optimized SARS-CoV-2 Spike cDNA (FIG. 13) or RBD-Sb subdomains were inserted into pAd6-AIII-AE3 with and without genetic adjuvant or chaff genes (FIG. 12) and rescued in 293-IIIA cells. CsCl-purified SC-Ad6-Spike produced monomer, dimer, and trimers of spike as well as cleaves S2 domain after infection of A549 human lung cells as demonstrated by western blot with anti-spike antibody (FIG. 14). SC-Ad6-Spike induced cell-cell fusion and syncytia in cells engineered to express its receptor ACE2 (FIG. 15). When these syncytia were examined, they contained abundant amounts of adenovirus proteins as demonstrated by immunohistochemical staining for adenovirus hexon with AdenoX Rapid Titer reagent (FIG. 16). When SC-Ad6-Spike was used to immunize BALB/c mice by the intranasal (i.n.) or intramuscular (i.m.) route, the virus induced strong spike antibodies within 2 weeks as demonstrated by ELISA using 1/1000 dilutions of mouse sera (FIG. 20A). These were class-switched IgG antibodies and they were significantly higher than negative control mice immunized with PBS buffer or SC-Ad expressing Zika E (p<0.0001 by one-way ANOVA). At 6 weeks after immunization, IgG antibodies remained elevated in sera. Notably, intranasal immunization also generated IgA antibodies indicative of responses at mucosal barriers (FIG. 20B). Dose-finding studies in BALB/c mice demonstrated significant IgG antibodies responses were generated 2 weeks after a single i.n. or i.m. immunization with 10⁸ viral particles of SC-Ad-Spike (** p<0.01, **** p<0.0001 by ANOVA, FIG. 20C).

[0133] A replication-defective Ad6 (RD-Ad6) with an E1 deletion was constructed with the same Spike expression cassette. RD-Ad6-Spike and SC-Ad-Spike were used to infect A549 human lung cells with different numbers of virus particles (vp) per cell. When cell lystates were examined 24 hours later by western blot for the Spike protein, this revealed that SC-Ad expressed high levels of Spike protein when 10² or 10⁴ vp of the virus (FIG. 21). In contrast, RD-Ad-Spike produce no detectable Spike protein with 10² particles of virus and only low levels of Spike protein with 10⁴ vp of virus.

[0134] SC-Ad expressing coronavirus Spike or RBD proteins can be modified by the addition of influenza genes to generate a combined coronavirus and influenza virus vaccine. For example, SC-Ad6 containing Spike and a centralized H1 consensus influenza hemagglutinin (H1-CON) gene or SC-Ad6 containing the Spike RBD domain and a centralized H1 consensus influenza hemagglutinin (H1-CON) gene (FIG. 22). Alternatively, an SC-Ad expressing Spike or RBD could be co-immunized with an SC-Ad expressing two influenza consensus immunogens. For example, SC-Ad6 containing centralized H1 consensus influenza H1-CON and H1-5 centralized HA gene H1-5-CON (FIG. 23).

### Example 3: Single-Cycle Adenovirus Vectors Expressing Genetic Adjuvants

[0135] 10⁹ viral particles (vp) of SC-Ad6 expressing clade C gp140 from SHIV-1157ipd3N4 was used to immunize BALB/c mice by the i.n. route in combination with 109 SC-Ads expressing 4-1BBL, GMCSF, C. diff toxin fragment TcdA/B or a non-specific adenovirus control expressing GFP-Luciferase. ELISAs using serum collected 6 weeks after single immunization demonstrated significant increases in antibody isotypes by GMCSF and TcdA/B (p<0.05 or less for all IgGs) (FIG. 25). When vaginal washes were assayed for IgA at the same time point, this revealed similar trends with highest mucosal IgA mediated by i.n. co-delivery of TcdA/B adjuvant (FIG. 26).

[0136] SC-Ad-GMCSF and TcdA/B were tested again by the i.m. route with 10-fold more SC-Ad. SC-Ad-IL-21 adjuvant was also added for its ability to stimulate Tfh and other T cells. In this case, i.m. injections were administered to the quadriceps muscles near to the vaginal sample site. 6 weeks after this single higher dose i.m. immunization, ELISA with 1/2000 dilutions of sera showed increased env IgG levels by SC-Ad-GMCSF, TcdA/B and IL-21 (p<0.05 vs PBS). SC-Ad-IL-21 provided even higher antibody levels than GMCSF or TcdA/B (p<0.0001 vs PBS). When vaginal wash samples were tested for IgG, all SC-Ad-1157 animals had increases, but only SC-Ad-IL-21 adjuvant reached significance (p<0.05 vs PBS). When vaginal washes were assayed for IgA at the same time point, this revealed similar trends with higher mucosal IgA in most animals in the GMCSF, TcdA/B, and IL-21 groups, only the IL-21 group reached p<0.05). Soluble HIV SOSIP envelope protein was used to boost the responses generated by SC-Ad. Each of the i.m. SC-Ad-1157+SC-Ad adjuvant immunized mice was boosted with 5 μg of clade C CZA97 SOSIP.v4.2-M6.IT mixed with the NKT cell adjuvant alphaGalCer. One half of the mice were boosted by the i.m. route and one half were boosted by the i.n. route. 2 weeks later, vaginal washes were collected and assayed for IgA or IgG antibodies against clade C env (FIG. 27). These data showed a strong bias in antibody responses based on the route of delivery of the SOSIP protein boost. i.m. SOSIP increased vaginal IgG levels generated by i.m. SC-Ad-1157 and SC-Ad GFP-Luc or GMCSF better than i.n. protein. In contrast, i.n. SOSIP protein boost strongly amplified vaginal IgA levels in mice that were primed by the i.m. route with SC-Ad-1157 with the strongest SC-Ad adjuvants: GMCSF, TcdA/B, and IL-21. The SC-Ad-1157+SC-Ad-GFP-Luc group showed robust IgG responses when primed and boosted intramuscularly, but failed to generate a strong IgG response when the SOSIP was given i.n. Furthermore, either of these combinations failed to generate IgA responses. This would suggest that genetic adjuvants that are given in place of SC-Ad-GFP-Luc prime the animals to drive the IgA responses we observe when they are boosted i.n. also show that priming at mucosal surfaces. The protein administered to unprimed animals generated little IgG or IgA response in vaginal washes.

### Example 4: Antibody Responses Generated by SC-Ad Vectors Expressing a Spike Variant Polypeptide

[0137] Groups of 5 hamsters were immunized with the indicated numbers of viral particles of the indicated SC-Ad Ad6 or Ad657 vectors expressing a Spike polypeptide or a gamma mink Spike variant polypeptide by the intramuscular route. DE3ADP indicates SC-Ad with an alternate E3 deletion expressing original Wuhan Spike. Sera was collected 2 weeks later. The administered groups were blinded to the administrator.

[0138] Antibody responses generated by the vectors was measured. A 1/1000 dilution of sera was analyzed by ELISA against Spike 51 protein for IgG antibodies that bind the protein. Data are shown as the OD450 of the ELISA for each sample.

[0139] All immunizations elicited a similar immune response capable of recognizing both the gamma mink Spike variant polypeptide and the Spike polypeptide (FIG. 32).

### Example 5: Exemplary Embodiments

[0140] Embodiment 1. A single-cycle adenovirus (SC-Ad), wherein said SC-Ad comprises a genome lacking at least a portion of a nucleic acid sequence that encodes an adenovirus polypeptide, wherein said SC-Ad comprises said adenovirus polypeptide, and wherein said SC-Ad comprises a nucleic acid sequence encoding a coronavirus immunogen.

[0141] Embodiment 2. The SC-Ad of embodiment 1, wherein said adenovirus polypeptide is selected from the group consisting of a fiber polypeptide, a V polypeptide, a hexon polypeptide, a penton base polypeptide, and a pIIIa polypeptide.

[0142] Embodiment 3. The SC-Ad of any one of embodiments 1-2, wherein said coronavirus immunogen comprises a coronavirus Spike polypeptide or an immunogenic fragment thereof.

[0143] Embodiment 4. The SC-Ad of embodiment 3, wherein said coronavirus immunogen consists of or consists essentially of an amino acid sequence set forth in any one of SEQ ID NOs:1-4.

[0144] Embodiment 5. The SC-Ad of any one of embodiments 1-4, wherein said SC-Ad further comprises a nucleic acid sequence encoding an adjuvant polypeptide.

[0145] Embodiment 6. The SC-Ad of embodiment 5, wherein said adjuvant polypeptide is selected from the group consisting of a granulocyte-macrophage colony-stimulating factor (GM-CSF) polypeptide, an interleukin 4 (IL-4) polypeptide, an interleukin 21 (IL-21) polypeptide, a CD40 ligand (CD40L) polypeptide, a 4-1BB ligand (4-1BBL) polypeptide, a transforming growth factor beta (TGF-β) polypeptide, a Clostridium difficile TcdA polypeptide, a C. difficile TcdB polypeptide, and biologically active fragments thereof.

[0146] Embodiment 7. The SC-Ad of embodiment 5 or embodiment 6, wherein said coronavirus Spike polypeptide is fused to said adjuvant polypeptide.

[0147] Embodiment 8. The SC-Ad of embodiment 7, wherein said coronavirus Spike polypeptide fused to said adjuvant polypeptide consists essentially of or consists of an amino acid sequence set forth in SEQ ID NO:5.

[0148] Embodiment 9. The SC-Ad of any one of embodiments 1-4, wherein said SC-Ad further comprises a nucleic acid sequence encoding a chaff polypeptide.

[0149] Embodiment 10. The SC-Ad of embodiment 9, wherein said chaff polypeptide is a fragment of an ACE2 polypeptide.

[0150] Embodiment 11. The SC-Ad of embodiment 10, wherein said fragment of an ACE2 polypeptide comprises the extracellular region of an ACE2 polypeptide and lacks a transmembrane domain.

[0151] Embodiment 12. The SC-Ad of embodiment 11, wherein said chaff polypeptide consists essentially of or consists of an amino acid sequence set forth in SEQ ID NO:8 or SEQ ID NO:9.

[0152] Embodiment 13. The SC-Ad of any one of embodiments 9-12, wherein said coronavirus Spike polypeptide is fused to said chaff polypeptide.

[0153] Embodiment 14. A composition comprising the SC-Ad of any one of embodiments 1-13.

[0154] Embodiment 15. A method for inducing an immune response against a coronavirus in a mammal, wherein said method comprises administering the SC-Ad of any one of embodiments 1-13 or the composition of embodiment 14 to said mammal under conditions wherein said SC-Ad infects a cell of said mammal, and wherein expression of said immunogen in said cell leads to induction of said immune response.

[0155] Embodiment 16. The method of embodiment 15, wherein said mammal is a human.

[0156] Embodiment 17. The method of any one of embodiments 15-16, wherein said coronavirus is a betacoronavirus.

[0157] Embodiment 18. The method of embodiment 17, wherein said betacoronavirus is SARS-CoV-2.

[0158] Embodiment 19. The method of any one of embodiments 15-18, wherein said administering comprising mucosal delivery of said SC-Ad.

[0159] Embodiment 20. A SC-Ad, wherein said SC-Ad comprises a genome lacking at least a portion of a nucleic acid sequence that encodes an adenovirus polypeptide, wherein said SC-Ad comprises said adenovirus polypeptide, and wherein said SC-Ad comprises (a) a nucleic acid sequence encoding an immunogen and (b) a nucleic acid sequence encoding an adjuvant polypeptide.

[0160] Embodiment 21. The SC-Ad of embodiment 20, wherein said adenovirus polypeptide is selected from the group consisting of a fiber polypeptide, a V polypeptide, a hexon polypeptide, a penton base polypeptide, and a pIIIa polypeptide.

[0161] Embodiment 22. The SC-Ad of any one of embodiments 20-21, wherein said immunogen is a coronavirus immunogen.

[0162] Embodiment 23. The SC-Ad of embodiment 22, wherein said coronavirus immunogen comprises a coronavirus Spike polypeptide or an immunogenic fragment thereof.

[0163] Embodiment 24. The SC-Ad of embodiment 23, wherein said coronavirus immunogen consists of or consists essentially of an amino acid sequence set forth in any one of SEQ ID NOs:1-4.

[0164] Embodiment 25. The SC-Ad of any one of embodiments 20-24, wherein said adjuvant polypeptide is selected from the group consisting of a GM-CSF polypeptide, an IL-4 polypeptide, an IL-21 polypeptide, a CD40L polypeptide, a 4-1BBL polypeptide, a TGF-β polypeptide, a Clostridium difficile TcdA polypeptide, a C. difficile TcdB polypeptide, and biologically active fragments thereof.

[0165] Embodiment 26. The SC-Ad of embodiment 25, wherein said coronavirus Spike polypeptide is fused to said adjuvant polypeptide.

[0166] Embodiment 27. The SC-Ad of embodiment 26, wherein said coronavirus Spike polypeptide fused to said adjuvant polypeptide consists essentially of or consists of an amino acid sequence set forth in SEQ ID NO:5.

[0167] Embodiment 28. The SC-Ad of any one of embodiments 20-27, wherein said SC-Ad further comprises a nucleic acid sequence encoding a chaff polypeptide.

[0168] Embodiment 29. The SC-Ad of embodiment 28, wherein said chaff polypeptide is a fragment of an ACE2 polypeptide.

[0169] Embodiment 30. The SC-Ad of embodiment 29, wherein said fragment of an ACE2 polypeptide comprises the extracellular region of an ACE2 polypeptide and lacks a transmembrane domain.

[0170] Embodiment 31. The SD-Ac of embodiment 30, wherein said chaff polypeptide consists essentially of or consists of an amino acid sequence set forth in SEQ ID NO:8 or SEQ ID NO:9.

[0171] Embodiment 32. A composition comprising the SC-Ad of any one of embodiments 20-31.

[0172] Embodiment 33. A method for inducing an immune response against a virus in a mammal, wherein said method comprises administering the SC-Ad of any one of embodiments 20-31 or the composition of embodiment 32 to said mammal under conditions wherein said SC-Ad infects a cell of said mammal, and wherein expression of said immunogen in said cell leads to induction of said immune response.

[0173] Embodiment 34. The method of embodiment 33, wherein said mammal is a human.

[0174] Embodiment 35. The method of any one of embodiments 33-34, wherein said virus is a coronavirus, and wherein said immunogen is associated with said coronavirus.

[0175] Embodiment 36. The method of any one of embodiments 33-35, wherein said coronavirus is a betacoronavirus.

[0176] Embodiment 37. The method of embodiment 36, wherein said betacoronavirus is SARS-CoV-2.

[0177] Embodiment 38. The method of any one of embodiments 33-37, wherein said administering comprising mucosal delivery of said SC-Ad.

[0178] Embodiment 39. A SC-Ad, wherein said SC-Ad comprises a genome which lacks at least a portion of a nucleic acid sequence that encodes an adenovirus polypeptide, wherein said SC-Ad comprises said adenovirus polypeptide, and wherein said SC-Ad comprises (a) a nucleic acid sequence encoding an immunogen and (b) a nucleic acid sequence encoding a chaff polypeptide.

[0179] Embodiment 40. The SC-Ad of embodiment 39, wherein said adenovirus polypeptide is selected from the group consisting of a fiber polypeptide, a V polypeptide, a hexon polypeptide, a penton base polypeptide, and a pIIIa polypeptide.

[0180] Embodiment 41. The SC-Ad of any one of embodiments 39-40, wherein said immunogen is a coronavirus immunogen.

[0181] Embodiment 42. The SC-Ad of embodiment 41, wherein said coronavirus immunogen comprises a coronavirus Spike polypeptide or an immunogenic fragment thereof.

[0182] Embodiment 43. The SC-Ad of embodiment 42, wherein said coronavirus immunogen consists of or consists essentially of an amino acid sequence set forth in any one of SEQ ID NOs:1-4.

[0183] Embodiment 44. The SC-Ad of embodiment 43, wherein said chaff polypeptide is a fragment of an ACE2 polypeptide.

[0184] Embodiment 45. The SC-Ad of embodiment 44, wherein said fragment of an ACE2 polypeptide comprises the extracellular region of an ACE2 polypeptide and lacks a transmembrane domain.

[0185] Embodiment 46. The SD-Ac of embodiment 45, wherein said chaff polypeptide consists essentially of or consists of an amino acid sequence set forth in SEQ ID NO:8 or SEQ ID NO:9.

[0186] Embodiment 47. The SC-Ad of any one of embodiments 39-46, wherein said coronavirus Spike polypeptide is fused to said chaff polypeptide.

[0187] Embodiment 48. The SC-Ad of any one of embodiments 39-47, wherein said SC-Ad further comprises a nucleic acid sequence encoding an adjuvant polypeptide.

[0188] Embodiment 49. The SC-Ad of embodiment 48, wherein said adjuvant polypeptide is selected from the group consisting of a GM-CSF polypeptide, an IL-4 polypeptide, an IL-21 polypeptide, a CD40L polypeptide, a 4-1BBL polypeptide, a TGF-β polypeptide, a Clostridium difficile TcdA polypeptide, a C. difficile TcdB polypeptide, and biologically active fragments thereof.

[0189] Embodiment 50. A composition comprising the SC-Ad of any one of embodiments 39-49.

[0190] Embodiment 51. A method for inducing an immune response against a virus in a mammal, wherein said method comprises administering the SC-Ad of any one of claims 39-49 or the composition of claim 50 to said mammal under conditions wherein said SC-Ad infects a cell of said mammal, and wherein expression of said immunogen in said cell leads to induction of said immune response.

[0191] Embodiment 52. The method of embodiment 51, wherein said mammal is a human.

[0192] Embodiment 53. The method of any one of embodiments 51-52, wherein said virus is a coronavirus, and wherein said immunogen is associated with said coronavirus.

[0193] Embodiment 54. The method of embodiment 53, wherein said coronavirus is a betacoronavirus.

[0194] Embodiment 55. The method of embodiment 54, wherein said betacoronavirus is SARS-CoV-2.

[0195] Embodiment 56. The method of any one of embodiments 51-55, wherein said administering comprising mucosal delivery of said SC-Ad.

[0196] Embodiment 57. A SC-Ad, wherein said SC-Ad comprises a genome which lacks at least a portion of a nucleic acid sequence that encodes an adenovirus polypeptide, wherein said SC-Ad comprises said adenovirus polypeptide, and wherein said SC-Ad comprises (a) a nucleic acid sequence encoding an immunogen, (b) a nucleic acid sequence encoding an adjuvant polypeptide, and (c) a nucleic acid sequence encoding a chaff polypeptide.

[0197] Embodiment 58. The SC-Ad of embodiment 57, wherein said adenovirus polypeptide is selected from the group consisting of a fiber polypeptide, a V polypeptide, a hexon polypeptide, a penton base polypeptide, and a pIIIa polypeptide.

[0198] Embodiment 59. The SC-Ad of any one of embodiments 57-58, wherein said immunogen is a coronavirus immunogen.

[0199] Embodiment 60. The SC-Ad of embodiment 59, wherein said coronavirus immunogen comprises a coronavirus Spike polypeptide or an immunogenic fragment thereof.

[0200] Embodiment 61. The SC-Ad of embodiment 60, wherein said coronavirus immunogen consists of or consists essentially of an amino acid sequence set forth in any one of SEQ ID NOs:1-4.

[0201] Embodiment 62. The SC-Ad of any one of embodiments 57-61, wherein said adjuvant polypeptide is selected from the group consisting of a GM-CSF polypeptide, an IL-4 polypeptide, an IL-21 polypeptide, a CD40L polypeptide, a 4-1BBL polypeptide, a TGF-β polypeptide, a Clostridium difficile TcdA polypeptide, a C. difficile TcdB polypeptide, and biologically active fragments thereof.

[0202] Embodiment 63. The SC-Ad of any one of embodiments 57-61, wherein said chaff polypeptide is a fragment of an ACE2 polypeptide.

[0203] Embodiment 64. The SC-Ad of embodiment 63, wherein said fragment of an ACE2 polypeptide comprises the extracellular region of an ACE2 polypeptide and lacks a transmembrane domain.

[0204] Embodiment 65. The SD-Ac of embodiment 64, wherein said chaff polypeptide consists essentially of or consists of an amino acid sequence set forth in SEQ ID NO:8 or SEQ ID NO:9.

[0205] Embodiment 66. A composition comprising the SC-Ad of any one of embodiments 57-65.

[0206] Embodiment 67. A method for inducing an immune response against a virus in a mammal, wherein said method comprises administering the SC-Ad of any one of embodiments 57-65 or the composition of embodiment 66 to said mammal under conditions wherein said SC-Ad infects a cell of said mammal, and wherein expression of said immunogen in said cell leads to induction of said immune response.

[0207] Embodiment 68. The method of embodiment 67, wherein said mammal is a human.

[0208] Embodiment 69. The method of any one of embodiments 67-68, wherein said virus is a coronavirus, and wherein said immunogen is associated with said coronavirus.

[0209] Embodiment 70. The method of embodiment 69, wherein said coronavirus is a betacoronavirus.

[0210] Embodiment 71. The method of embodiment 70, wherein said betacoronavirus is SARS-CoV-2.

[0211] Embodiment 72. The method of any one of embodiments 51-55, wherein said administering comprising mucosal delivery of said SC-Ad.

[0212] Embodiment 73. A SC-Ad, wherein said SC-Ad comprises a genome lacking at least a portion of a nucleic acid sequence that encodes an adenovirus polypeptide, wherein said SC-Ad comprises said adenovirus polypeptide, and wherein said SC-Ad comprises a nucleic acid sequence encoding an immunogen expressed by or shed by an allergen.

[0213] Embodiment 74. The SC-Ad of embodiment 73, wherein said adenovirus polypeptide is selected from the group consisting of a fiber polypeptide, a V polypeptide, a hexon polypeptide, a penton base polypeptide, and a pIIIa polypeptide.

[0214] Embodiment 75. The SC-Ad of any one of embodiments 73-74, wherein said SC-Ad further comprises a nucleic acid sequence encoding an adjuvant polypeptide.

[0215] Embodiment 76. The SC-Ad of embodiment 75, wherein said adjuvant polypeptide is selected from the group consisting of a GM-CSF polypeptide, an IL-4 polypeptide, an IL-21 polypeptide, a CD40L polypeptide, a 4-1BBL polypeptide, a TGF-β polypeptide, a Clostridium difficile TcdA polypeptide, a C. difficile TcdB polypeptide, and biologically active fragments thereof.

[0216] Embodiment 77. The SC-Ad of any one of embodiments 73-76, wherein said SC-Ad further comprises a nucleic acid sequence encoding a chaff polypeptide.

[0217] Embodiment 78. The SC-Ad of embodiment 77, wherein said chaff polypeptide is a fragment of an ACE2 polypeptide.

[0218] Embodiment 79. The SC-Ad of embodiment 78, wherein said fragment of an ACE2 polypeptide comprises the extracellular region of an ACE2 polypeptide and lacks a transmembrane domain.

[0219] Embodiment 80. The SC-Ad of embodiment 79, wherein said chaff polypeptide consists essentially of or consists of an amino acid sequence set forth in SEQ ID NO:8 or SEQ ID NO:9.

[0220] Embodiment 81. A composition comprising the SC-Ad of any one of embodiments 73-80.

[0221] Embodiment 82. A method for inducing an immune response against an allergen in a mammal, wherein said method comprises administering the SC-Ad of any one of embodiments 73-80 or the composition of embodiment 81 to said mammal under conditions wherein said SC-Ad infects a cell of said mammal, and wherein expression of said immunogen in said cell leads to induction of said immune response.

[0222] Embodiment 83. The method of embodiment 15, wherein said mammal is a human.

[0223] Embodiment 84. A SC-Ad, wherein said SC-Ad comprises a genome lacking at least a portion of a nucleic acid sequence that encodes an adenovirus polypeptide, wherein said SC-Ad comprises said adenovirus polypeptide, and wherein said SC-Ad comprises a nucleic acid sequence encoding an immunogen expressed by a cancer cell.

[0224] Embodiment 85. The SC-Ad of embodiment 84, wherein said adenovirus polypeptide is selected from the group consisting of a fiber polypeptide, a V polypeptide, a hexon polypeptide, a penton base polypeptide, and a pIIIa polypeptide.

[0225] Embodiment 86. The SC-Ad of any one of embodiments 84-85, wherein said SC-Ad further comprises a nucleic acid sequence encoding an adjuvant polypeptide.

[0226] Embodiment 87. The SC-Ad of embodiment 86, wherein said adjuvant polypeptide is selected from the group consisting of a GM-CSF polypeptide, an IL-4 polypeptide, an IL-21 polypeptide, a CD40L polypeptide, a 4-1BBL polypeptide, a TGF-β polypeptide, a Clostridium difficile TcdA polypeptide, a C. difficile TcdB polypeptide, and biologically active fragments thereof.

[0227] Embodiment 88. The SC-Ad of any one of embodiments 84-87, wherein said SC-Ad further comprises a nucleic acid sequence encoding a chaff polypeptide.

[0228] Embodiment 89. The SC-Ad of embodiment 88, wherein said chaff polypeptide is a fragment of an ACE2 polypeptide.

[0229] Embodiment 90. The SC-Ad of embodiment 89, wherein said fragment of an ACE2 polypeptide comprises the extracellular region of an ACE2 polypeptide and lacks a transmembrane domain.

[0230] Embodiment 91. The SC-Ad of embodiment 90, wherein said chaff polypeptide consists essentially of or consists of an amino acid sequence set forth in SEQ ID NO:8 or SEQ ID NO:9.

[0231] Embodiment 92. A composition comprising the SC-Ad of any one of embodiments 84-91.

[0232] Embodiment 93. A method for inducing an immune response against a cancer cell in a mammal, wherein said method comprises administering the SC-Ad of any one of embodiments 84-91 or the composition of embodiment 92 to said mammal under conditions wherein said SC-Ad infects a cell of said mammal, and wherein expression of said immunogen in said cell leads to induction of said immune response.

[0233] Embodiment 94. The method of embodiment 93, wherein said mammal is a human.

[0234] Embodiment 95. A SC-Ad, wherein said SC-Ad comprises a genome lacking at least a portion of a nucleic acid sequence that encodes an adenovirus polypeptide, wherein said SC-Ad comprises said adenovirus polypeptide, and wherein said SC-Ad comprises a nucleic acid sequence encoding a C. difficile polypeptide.

[0235] Embodiment 96. The SC-Ad of embodiment 95, wherein said C. difficile polypeptide is a TcdA/B fusion polypeptide.

[0236] Embodiment 97. The SC-Ad of embodiment 95, wherein said C. difficile polypeptide comprises the amino acid sequence set forth in SEQ ID NO:22 or comprises an amino acid sequence at least 85 percent identical to the sequence set forth in SEQ ID NO:22.

[0237] Embodiment 98. The SC-Ad of embodiment 97, wherein said C. difficile polypeptide comprises the amino acid sequence set forth in SEQ ID NO:22.

[0238] Embodiment 99. The SC-Ad of embodiment 95, wherein said C. difficile polypeptide comprises the amino acid sequence set forth in SEQ ID NO:23 or comprises an amino acid sequence at least 85 percent identical to the sequence set forth in SEQ ID NO:23.

[0239] Embodiment 100. The SC-Ad of embodiment 97, wherein said C. difficile polypeptide comprises the amino acid sequence set forth in SEQ ID NO:23.

[0240] Embodiment 101. The SC-Ad of embodiment 95, wherein said C. difficile polypeptide comprises the amino acid sequence set forth in SEQ ID NO:10 or comprises an amino acid sequence at least 85 percent identical to the sequence set forth in SEQ ID NO:10.

[0241] Embodiment 102. The SC-Ad of embodiment 101, wherein said C. difficile polypeptide comprises the amino acid sequence set forth in SEQ ID NO:10.

[0242] Embodiment 103. A Sc-Ad, wherein said Sc-Ad comprises a nucleic acid sequence selected from the group consisting of SEQ ID NO:28, SEQ ID NO:29, SEQ ID NO:30, and SEQ ID NO:31.

[0243] Embodiment 104. The SC-Ad of embodiment 3, wherein said coronavirus immunogen consists of or consists essentially of an amino acid sequence set forth in any one of SEQ ID NOs:42-44, 47, and 48.

[0244] Embodiment 105. The SC-Ad of embodiment 23, wherein said coronavirus immunogen consists of or consists essentially of an amino acid sequence set forth in any one of SEQ ID NOs:42-44, 47, and 48.

[0245] Embodiment 106. The SC-Ad of embodiment 42, wherein said coronavirus immunogen consists of or consists essentially of an amino acid sequence set forth in any one of SEQ ID NOs:42-44, 47, and 48.

[0246] Embodiment 107. A composition comprising two or more populations of SC-Ads, wherein each population of SC-Ads comprises a genome lacking at least a portion of a nucleic acid sequence that encodes an adenovirus polypeptide, wherein each population of said SC-Ad comprises said adenovirus polypeptide, and wherein each population of said SC-Ads independently comprises a nucleic acid sequence encoding a coronavirus immunogen.

[0247] Embodiment 108. The composition of embodiment 107, wherein said adenovirus polypeptide is selected from the group consisting of a fiber polypeptide, a V polypeptide, a hexon polypeptide, a penton base polypeptide, and a pIIIa polypeptide.

[0248] Embodiment 109. The composition of any one of embodiments 107-108, wherein said coronavirus immunogen comprises a coronavirus Spike polypeptide or an immunogenic fragment thereof.

[0249] Embodiment 110. The composition of any one of embodiments 107-109, wherein said coronavirus immunogen consists of or consists essentially of an amino acid sequence set forth in any one of SEQ ID NOs:1-4, 42-44, 47, and 48.

[0250] Embodiment 111. The composition of any one of embodiments 107-110, wherein said SC-Ads of said two or more populations of SC-Ads further comprise a nucleic acid sequence encoding an adjuvant polypeptide.

[0251] Embodiment 112. The composition of embodiment 111, wherein said adjuvant polypeptide is selected from the group consisting of a GM-CSF polypeptide, an IL-4 polypeptide, an IL-21 polypeptide, a CD40L polypeptide, a 4-1BBL polypeptide, a TGF-β polypeptide, a C. difficile TcdA polypeptide, a C. difficile TcdB polypeptide, and biologically active fragments thereof.

[0252] Embodiment 113. The composition of embodiment 111 or embodiment 112, wherein said coronavirus Spike polypeptide is fused to said adjuvant polypeptide.

[0253] Embodiment 114. The composition of embodiment 113, wherein said coronavirus Spike polypeptide fused to said adjuvant polypeptide consists essentially of or consists of an amino acid sequence set forth in SEQ ID NO:5.

[0254] Embodiment 115. The composition of any one of embodiments 107-110, wherein said SC-Ads of said two or more populations of SC-Ads further comprise a nucleic acid sequence encoding a chaff polypeptide.

[0255] Embodiment 116. The composition of embodiment 115, wherein said chaff polypeptide is a fragment of an ACE2 polypeptide.

[0256] Embodiment 117. The composition of embodiment 116, wherein said fragment of an ACE2 polypeptide comprises the extracellular region of an ACE2 polypeptide and lacks a transmembrane domain.

[0257] Embodiment 118. The composition of embodiment 117, wherein said chaff polypeptide consists essentially of or consists of an amino acid sequence set forth in SEQ ID NO:8 or SEQ ID NO:9.

[0258] Embodiment 119. The composition of any one of embodiments 115-118, wherein said coronavirus Spike polypeptide is fused to said chaff polypeptide.

### Sequence Listing Free Text

[0259] SEQ ID NO:1
[0260] amino acid sequence of a SARS-CoV-2 Spike polypeptide
[0261] SEQ ID NO:2
[0262] amino acid sequence of a SARS-CoV-2 Spike polypeptide lacking an ER retention sequence
[0263] SEQ ID NO:3
[0264] amino acid sequence of an ectodomain of a SARS-CoV-2 Spike polypeptide
[0265] SEQ ID NO:4
[0266] amino acid sequence of a receptor binding domain of a SARS-CoV-2 Spike polypeptide
[0267] SEQ ID NO:5
[0268] amino acid sequence of a receptor binding domain of a SARS-CoV-2 Spike polypeptide fused to an Ig polypeptide
[0269] SEQ ID NO:6
[0270] amino acid sequence of a receptor binding domain of a SARS-CoV-2 Spike polypeptide fused to a streptavidin polypeptide
[0271] SEQ ID NO:7
[0272] amino acid sequence of a receptor binding domain of a SARS-CoV-2 Spike polypeptide fused to a sigma coil polypeptide
[0273] SEQ ID NO:8
[0274] amino acid sequence of an ectodomain of an ACE2 chaff polypeptide
[0275] SEQ ID NO:9
[0276] amino acid sequence of an inactivated ectodomain of an ACE2 chaff polypeptide
[0277] SEQ ID NO:10
[0278] amino acid sequence of a TcdA/B fusion polypeptide
[0279] SEQ ID NO:11
[0280] amino acid sequence of a SARS-CoV-2 ORF1ab polypeptide
[0281] SEQ ID NO: 12
[0282] amino acid sequence of a SARS-CoV-2 S polypeptide
[0283] SEQ ID NO: 13
[0284] amino acid sequence of a SARS-CoV-2 ORF3 polypeptide
[0285] SEQ ID NO:14
[0286] amino acid sequence of a SARS-CoV-2 E polypeptide
[0287] SEQ ID NO:15
[0288] amino acid sequence of a SARS-CoV-2 M polypeptide
[0289] SEQ ID NO:16
[0290] amino acid sequence of a SARS-CoV-2 ORF3 polypeptide
[0291] SEQ ID NO:17
[0292] amino acid sequence of a SARS-CoV-2 ORF7 polypeptide
[0293] SEQ ID NO:18
[0294] amino acid sequence of a SARS-CoV-2 ORF8 polypeptide
[0295] SEQ ID NO:19
[0296] amino acid sequence of a SARS-CoV-2 N polypeptide
[0297] SEQ ID NO:20
[0298] amino acid sequence of a centralized H1 influenza hemagglutinin polypeptide
[0299] SEQ ID NO:21
[0300] amino acid sequence of a centralized H1-5 influenza hemagglutinin polypeptide
[0301] SEQ ID NO:22
[0302] an amino acid sequence of a TcdA polypeptide
[0303] SEQ ID NO:23
[0304] amino acid sequence of a TcdB polypeptide
[0305] SEQ ID NO:24
[0306] nucleic acid sequence that can encode a TcdA polypeptide derived from a C. difficile toxin
[0307] SEQ ID NO:25
[0308] nucleic acid sequence that can encode a TcdB polypeptide derived from a C. difficile toxin
[0309] SEQ ID NO:26
[0310] nucleic acid sequence that can encode a SC-Ad-Spike virus
[0311] SEQ ID NO:27
[0312] nucleic acid sequence that can encode a SC-Ad-TcdA/B virus
[0313] SEQ ID NO:28
[0314] SC-Ad6-ΔIII-ΔE3-CMV-Spike-3X-LZL nucleic acid
[0315] SEQ ID NO:29
[0316] a SC-Ad6-ΔIII-ΔE3-CMV-Spike-PP-3X-LZL nucleic acid
[0317] SEQ ID NO:30
[0318] SC-Ad6-ΔIII-ΔE3ADP-I-CMV-Spike-3X-L nucleic acid
[0319] SEQ ID NO:31
[0320] SC-Ad6-ΔIII-ΔE3ADP-I-CMV-Spike-PP-3X-L nucleic acid
[0321] SEQ ID NO:32
[0322] SC-Ad-FZF-657-ΔIIIF-ΔE3-Spike-3X-L nucleic acid
[0323] SEQ ID NO:33
[0324] SC-Ad-FZF-657-ΔIIIF-ΔE3-SpikePP-3X-L nucleic acid
[0325] SEQ ID NO:34
[0326] SC-Ad-FZF-C68-ΔIIIF-AF3-Spike-3X-L nucleic acid
[0327] SEQ ID NO:35
[0328] SC-Ad-FZF-C68-ΔIIIF-AF3-SpikePP-3X-L nucleic acid
[0329] SEQ ID NO:36
[0330] SC-Ad-F-657-ΔIIIF-ΔE3-Spike-3X-L nucleic acid
[0331] SEQ ID NO:37
[0332] SC-Ad-F-657-ΔIIIF-ΔE3-SpikePP-3X-L nucleic acid
[0333] SEQ ID NO:38
[0334] SC-Ad-F-C68-ΔIIIF-ΔE3-Spike-3X-L nucleic acid
[0335] SEQ ID NO:39
[0336] SC-Ad-F-C68-ΔIIIF-ΔE3-SpikePP-3X-L nucleic acid
[0337] SEQ ID NO:40
[0338] nucleic acid sequence encoding an AAT secretory sequence
[0339] SEQ ID NO:41
[0340] nucleic acid sequence encoding a synthetic furin cleavage site
[0341] SEQ ID NO:42
[0342] amino acid sequence of a SARS-CoV-2 gamma mink Spike variant polypeptide having K417T, Y453F, E484K, N501Y, D614G, K986P, and V987P mutations
[0343] SEQ ID NO:43
[0344] amino acid sequence of a SARS-CoV-2 B.1.617.2 (Delta) Spike variant polypeptide having T19R, G142D, R158G, 156-157del, L452R, T478K, D614G, P681R, D950N, K986P, and V987P mutations
[0345] SEQ ID NO:44
[0346] amino acid sequence of a SARS-CoV-2 B.1.617.2.1 (Delta-Plus) Spike polypeptide variant having T19R, G142D, R158G, 156-157del, K417T, L452R, T478K, D614G, P681R, D950N, K986P, and V987P mutations
[0347] SEQ ID NO:45
[0348] amino acid sequence of a M/N fusion polypeptide
[0349] SEQ ID NO:46
[0350] amino acid sequence of C. difficile tcdB/B (tcdBx2) fusion polypeptide
[0351] SEQ ID NO:47
[0352] amino acid sequence of a SARS-CoV-2 Lambda Spike polypeptide variant having G75I, T76I, del246-252, L452Q, F490S, D614G, T859N, K986P, and V987P mutations
[0353] SEQ ID NO:48
[0354] amino acid sequence of a SARS-CoV-2 Epsilon Spike polypeptide variant having S13I , W152C, L452R, D614G, K986P, and V987P mutations

### OTHER EMBODIMENTS

[0355] It is to be understood that while the invention has been described in conjunction with the detailed description thereof, the foregoing description is intended to illustrate and not limit the scope of the invention, which is defined by the scope of the appended claims. Other aspects, advantages, and modifications are within the scope of the following claims.

The application's sequence listing, which the Patent Office published only in electronic form, follows.

SEQUENCE LISTING (48 sequences)

SEQ ID NO: 1 - protein, 1273 aa, Betacoronavirus SARS-CoV-2
MFVFLVLLPLVSSQCVNLTTRTQLPPAYTNSFTRGVYYPDKVFRSSVLHSTQDLFLPFFSNVTWFHAIHVSGTNGTKRFDNPVLPFNDGVYFASTEKSNIIRGWIFGTTLDSKTQSLLIVNNATNVVIKVCEFQFCNDPFLGVYYHKNNKSWMESEFRVYSSANNCTFEYVSQPFLMDLEGKQGNFKNLREFVFKNIDGYFKIYSKHTPINLVRDLPQGFSALEPLVDLPIGINITRFQTLLALHRSYLTPGDSSSGWTAGAAAYYVGYLQPRTFLLKYNENGTITDAVDCALDPLSETKCTLKSFTVEKGIYQTSNFRVQPTESIVRFPNITNLCPFGEVFNATRFASVYAWNRKRISNCVADYSVLYNSASFSTFKCYGVSPTKLNDLCFTNVYADSFVIRGDEVRQIAPGQTGKIADYNYKLPDDFTGCVIAWNSNNLDSKVGGNYNYLYRLFRKSNLKPFERDISTEIYQAGSTPCNGVEGFNCYFPLQSYGFQPTNGVGYQPYRVVVLSFELLHAPATVCGPKKSTNLVKNKCVNFNFNGLTGTGVLTESNKKFLPFQQFGRDIADTTDAVRDPQTLEILDITPCSFGGVSVITPGTNTSNQVAVLYQDVNCTEVPVAIHADQLTPTWRVYSTGSNVFQTRAGCLIGAEHVNNSYECDIPIGAGICASYQTQTNSPRRARSVASQSIIAYTMSLGAENSVAYSNNSIAIPTNFTISVTTEILPVSMTKTSVDCTMYICGDSTECSNLLLQYGSFCTQLNRALTGIAVEQDKNTQEVFAQVKQIYKTPPIKDFGGFNFSQILPDPSKPSKRSFIEDLLFNKVTLADAGFIKQYGDCLGDIAARDLICAQKFNGLTVLPPLLTDEMIAQYTSALLAGTITSGWTFGAGAALQIPFAMQMAYRFNGIGVTQNVLYENQKLIANQFNSAIGKIQDSLSSTASALGKLQDVVNQNAQALNTLVKQLSSNFGAISSVLNDILSRLDKVEAEVQIDRLITGRLQSLQTYVTQQLIRAAEIRASANLAATKMSECVLGQSKRVDFCGKGYHLMSFPQSAPHGVVFLHVTYVPAQEKNFTTAPAICHDGKAHFPREGVFVSNGTHWFVTQRNFYEPQIITTDNTFVSGNCDVVIGIVNNTVYDPLQPELDSFKEELDKYFKNHTSPDVDLGDISGINASVVNIQKEIDRLNEVAKNLNESLIDLQELGKYEQYIKWPWYIWLGFIAGLIAIVMVTIMLCCMTSCCSCLKGCCSCGSCCKFDEDDSEPVLKGVKLHYT

SEQ ID NO: 2 - protein, 1268 aa, Betacoronavirus SARS-CoV-2
MFVFLVLLPLVSSQCVNLTTRTQLPPAYTNSFTRGVYYPDKVFRSSVLHSTQDLFLPFFSNVTWFHAIHVSGTNGTKRFDNPVLPFNDGVYFASTEKSNIIRGWIFGTTLDSKTQSLLIVNNATNVVIKVCEFQFCNDPFLGVYYHKNNKSWMESEFRVYSSANNCTFEYVSQPFLMDLEGKQGNFKNLREFVFKNIDGYFKIYSKHTPINLVRDLPQGFSALEPLVDLPIGINITRFQTLLALHRSYLTPGDSSSGWTAGAAAYYVGYLQPRTFLLKYNENGTITDAVDCALDPLSETKCTLKSFTVEKGIYQTSNFRVQPTESIVRFPNITNLCPFGEVFNATRFASVYAWNRKRISNCVADYSVLYNSASFSTFKCYGVSPTKLNDLCFTNVYADSFVIRGDEVRQIAPGQTGKIADYNYKLPDDFTGCVIAWNSNNLDSKVGGNYNYLYRLFRKSNLKPFERDISTEIYQAGSTPCNGVEGFNCYFPLQSYGFQPTNGVGYQPYRVVVLSFELLHAPATVCGPKKSTNLVKNKCVNFNFNGLTGTGVLTESNKKFLPFQQFGRDIADTTDAVRDPQTLEILDITPCSFGGVSVITPGTNTSNQVAVLYQDVNCTEVPVAIHADQLTPTWRVYSTGSNVFQTRAGCLIGAEHVNNSYECDIPIGAGICASYQTQTNSPRRARSVASQSIIAYTMSLGAENSVAYSNNSIAIPTNFTISVTTEILPVSMTKTSVDCTMYICGDSTECSNLLLQYGSFCTQLNRALTGIAVEQDKNTQEVFAQVKQIYKTPPIKDFGGFNFSQILPDPSKPSKRSFIEDLLFNKVTLADAGFIKQYGDCLGDIAARDLICAQKFNGLTVLPPLLTDEMIAQYTSALLAGTITSGWTFGAGAALQIPFAMQMAYRFNGIGVTQNVLYENQKLIANQFNSAIGKIQDSLSSTASALGKLQDVVNQNAQALNTLVKQLSSNFGAISSVLNDILSRLDKVEAEVQIDRLITGRLQSLQTYVTQQLIRAAEIRASANLAATKMSECVLGQSKRVDFCGKGYHLMSFPQSAPHGVVFLHVTYVPAQEKNFTTAPAICHDGKAHFPREGVFVSNGTHWFVTQRNFYEPQIITTDNTFVSGNCDVVIGIVNNTVYDPLQPELDSFKEELDKYFKNHTSPDVDLGDISGINASVVNIQKEIDRLNEVAKNLNESLIDLQELGKYEQYIKWPWYIWLGFIAGLIAIVMVTIMLCCMTSCCSCLKGCCSCGSCCKFDEDDSEPVLKGV

SEQ ID NO: 3 - protein, 1210 aa, Betacoronavirus SARS-CoV-2
MFVFLVLLPLVSSQCVNLTTRTQLPPAYTNSFTRGVYYPDKVFRSSVLHSTQDLFLPFFSNVTWFHAIHVSGTNGTKRFDNPVLPFNDGVYFASTEKSNIIRGWIFGTTLDSKTQSLLIVNNATNVVIKVCEFQFCNDPFLGVYYHKNNKSWMESEFRVYSSANNCTFEYVSQPFLMDLEGKQGNFKNLREFVFKNIDGYFKIYSKHTPINLVRDLPQGFSALEPLVDLPIGINITRFQTLLALHRSYLTPGDSSSGWTAGAAAYYVGYLQPRTFLLKYNENGTITDAVDCALDPLSETKCTLKSFTVEKGIYQTSNFRVQPTESIVRFPNITNLCPFGEVFNATRFASVYAWNRKRISNCVADYSVLYNSASFSTFKCYGVSPTKLNDLCFTNVYADSFVIRGDEVRQIAPGQTGKIADYNYKLPDDFTGCVIAWNSNNLDSKVGGNYNYLYRLFRKSNLKPFERDISTEIYQAGSTPCNGVEGFNCYFPLQSYGFQPTNGVGYQPYRVVVLSFELLHAPATVCGPKKSTNLVKNKCVNFNFNGLTGTGVLTESNKKFLPFQQFGRDIADTTDAVRDPQTLEILDITPCSFGGVSVITPGTNTSNQVAVLYQDVNCTEVPVAIHADQLTPTWRVYSTGSNVFQTRAGCLIGAEHVNNSYECDIPIGAGICASYQTQTNSPRRARSVASQSIIAYTMSLGAENSVAYSNNSIAIPTNFTISVTTEILPVSMTKTSVDCTMYICGDSTECSNLLLQYGSFCTQLNRALTGIAVEQDKNTQEVFAQVKQIYKTPPIKDFGGFNFSQILPDPSKPSKRSFIEDLLFNKVTLADAGFIKQYGDCLGDIAARDLICAQKFNGLTVLPPLLTDEMIAQYTSALLAGTITSGWTFGAGAALQIPFAMQMAYRFNGIGVTQNVLYENQKLIANQFNSAIGKIQDSLSSTASALGKLQDVVNQNAQALNTLVKQLSSNFGAISSVLNDILSRLDKVEAEVQIDRLITGRLQSLQTYVTQQLIRAAEIRASANLAATKMSECVLGQSKRVDFCGKGYHLMSFPQSAPHGVVFLHVTYVPAQEKNFTTAPAICHDGKAHFPREGVFVSNGTHWFVTQRNFYEPQIITTDNTFVSGNCDVVIGIVNNTVYDPLQPELDSFKEELDKYFKNHTSPDVDLGDISGINASVVNIQKEIDRLNEVAKNLNESLIDLQELGKYEQYI

SEQ ID NO: 4 - protein, 338 aa, Betacoronavirus SARS-CoV-2
MFVFLVLLPLVSSQCVNLTTRTQLPPAYTNSFTRGVYYPDKVFRSSVLHSTQDLFLPFFSNVTWFHAIHVSGTNGTKRFDNPVLPFNDGVYFASTEKSNIIRGWIFGTTLDSKTQSLLIVNNATNVVIKVCEFQFCNDPFLGVYYHKNNKSWMESEFRVYSSANNCTFEYVSQPFLMDLEGKQGNFKNLREFVFKNIDGYFKIYSKHTPINLVRDLPQGFSALEPLVDLPIGINITRFQTLLALHRSYLTPGDSSSGWTAGAAAYYVGYLQPRTFLLKYNENGTITDAVDCALDPLSETKCTLKSFTVEKGIYQTSNFRVQPTESIVRFPNITNLCPF

SEQ ID NO: 5 - protein, 491 aa, Artificial
  polypeptide sequence of a receptor binding domain of a SARS-CoV-2 Spike polypeptide fused to an Ig polypeptide
DPLQPRTFLLKYNENGTITDAVDCALDPLSETKCTLKSFTVEKGIYQTSNFRVQPTESIVRFPNITNLCPFGEVFNATRFASVYAWNRKRISNCVADYSVLYNSASFSTFKCYGVSPTKLNDLCFTNVYADSFVIRGDEVRQIAPGQTGKIADYNYKLPDDFTGCVIAWNSNNLDSKVGGNYNYLYRLFRKSNLKPFERDISTEIYQAGSTPCNGVEGFNCYFPLQSYGFQPTNGVGYQPYRVVVLSFELLHAPATVCGPKKSTNLCCVECPPCPAPPVAGPSVFLFPPKPKDTLMISRTPEVTCVVVDVSHEDPEVQFNWYVDGVEVHNAKTKPREEQFNSTFRVVSVLTVVHQDWLNGKEYKCKVSNKGLPAPIEKTISKTKGQPREPQVYTLPPSREEMTKNQVSLTCLVKGFYPSDIAVEWESNGQPENNYKTTPPMLDSDGSFFLYSKLTVDKSRWQQGNVFSCSVMHEALHNHYTQKSLSLSPGK

SEQ ID NO: 6 - protein, 420 aa, Artificial
  polypeptide sequence of a receptor binding domain of a SARS-CoV-2 Spike polypeptide fused to a streptavidin polypeptide
DPLQPRTFLLKYNENGTITDAVDCALDPLSETKCTLKSFTVEKGIYQTSNFRVQPTESIVRFPNITNLCPFGEVFNATRFASVYAWNRKRISNCVADYSVLYNSASFSTFKCYGVSPTKLNDLCFTNVYADSFVIRGDEVRQIAPGQTGKIADYNYKLPDDFTGCVIAWNSNNLDSKVGGNYNYLYRLFRKSNLKPFERDISTEIYQAGSTPCNGVEGFNCYFPLQSYGFQPTNGVGYQPYRVVVLSFELLHAPATVCGPKKSTNLCCVECPPCPAPPVAGTMGGAAGSGAAEAGITGTWYNQLGSTFIVTAGADGALTGTYESAVGNAESRYVLTGRYESAPATDGSGTALGWTVAWKNNYRNAHSATTWSGQYVGGAEARINTQWLLTSGTTEANAWKSTLVGHDTFTKVKPSAASGS

SEQ ID NO: 7 - protein, 411 aa, Artificial
  polypeptide sequence of a receptor binding domain of a SARS-CoV-2 Spike polypeptide fused to a sigma coil polypeptide
DPLQPRTFLLKYNENGTITDAVDCALDPLSETKCTLKSFTVEKGIYQTSNFRVQPTESIVRFPNITNLCPFGEVFNATRFASVYAWNRKRISNCVADYSVLYNSASFSTFKCYGVSPTKLNDLCFTNVYADSFVIRGDEVRQIAPGQTGKIADYNYKLPDDFTGCVIAWNSNNLDSKVGGNYNYLYRLFRKSNLKPFERDISTEIYQAGSTPCNGVEGFNCYFPLQSYGFQPTNGVGYQPYRVVVLSFELLHAPATVCGPKKSTNLCCVECPPCPAPPVAGSKGLESRVSALEKTSQIHSDTILRITQGLDDANKRIIALEQSRDDLVASVSDAQLAISRLESSIGALQTVVNGLDSSVTQLGARVGQLETGLAELRVDHDNLVARVDTAERNIGSLTTELSTLTLRVTSI

SEQ ID NO: 8 - protein, 740 aa, Homo sapiens
MSSSSWLLLSLVAVTAAQSTIEEQAKTFLDKFNHEAEDLFYQSSLASWNYNTNITEENVQNMNNAGDKWSAFLKEQSTLAQMYPLQEIQNLTVKLQLQALQQNGSSVLSEDKSKRLNTILNTMSTIYSTGKVCNPDNPQECLLLEPGLNEIMANSLDYNERLWAWESWRSEVGKQLRPLYEEYVVLKNEMARANHYEDYGDYWRGDYEVNGVDGYDYSRGQLIEDVEHTFEEIKPLYEHLHAYVRAKLMNAYPSYISPIGCLPAHLLGDMWGRFWTNLYSLTVPFGQKPNIDVTDAMVDQAWDAQRIFKEAEKFFVSVGLPNMTQGFWENSMLTDPGNVQKAVCHPTAWDLGKGDFRILMCTKVTMDDFLTAHHEMGHIQYDMAYAAQPFLLRNGANEGFHEAVGEIMSLSAATPKHLKSIGLLSPDFQEDNETEINFLLKQALTIVGTLPFTYMLEKWRWMVFKGEIPKDQWMKKWWEMKREIVGVVEPVPHDETYCDPASLFHVSNDYSFIRYYTRTLYQFQFQEALCQAAKHEGPLHKCDISNSTEAGQKLFNMLRLGKSEPWTLALENVVGAKNMNVRPLLNYFEPLFTWLKDQNKNSFVGWSTDWSPYADQSIKVRISLKSALGDKAYEWNDNEMYLFRSSVAYAMRQYFLKVKNQMILFGEEDVRVANLKPRISFNFFVTAPKNVSDIIPRTEVEKAIRMSRSRINDAFRLNDNSLEFLGIQPTLGPPNQPPVS

SEQ ID NO: 9 - protein, 740 aa, Artificial
  polypeptide sequence of an inactivated ectodomain of an ACE2 chaff polypeptide
MSSSSWLLLSLVAVTAAQSTIEEQAKTFLDKFNHEAEDLFYQSSLASWNYNTNITEENVQNMNNAGDKWSAFLKEQSTLAQMYPLQEIQNLTVKLQLQALQQNGSSVLSEDKSKRLNTILNTMSTIYSTGKVCNPDNPQECLLLEPGLNEIMANSLDYNERLWAWESWRSEVGKQLRPLYEEYVVLKNEMARANHYEDYGDYWRGDYEVNGVDGYDYSRGQLIEDVEHTFEEIKPLYEHLHAYVRAKLMNAYPSYISPIGCLPAHLLGDMWGRFWTNLYSLTVPFGQKPNIDVTDAMVDQAWDAQRIFKEAEKFFVSVGLPNMTQGFWENSMLTDPGNVQKAVCLPTAWDLGKGDFRILMCTKVTMDDFLTAHHEMGHIQYDMAYAAQPFLLRNGANEGFHEAVGEIMSLSAATPKHLKSIGLLSPDFQEDNETEINFLLKQALTIVGTLPFTYMLEKWRWMVFKGEIPKDQWMKKWWEMKREIVGVVEPVPHDETYCDPASLFHVSNDYSFIRYYTRTLYQFQFQEALCQAAKHEGPLHKCDISNSTEAGQKLFNMLRLGKSEPWTLALENVVGAKNMNVRPLLNYFEPLFTWLKDQNKNSFVGWSTDWSPYADQSIKVRISLKSALGDKAYEWNDNEMYLFRSSVAYAMRQYFLKVKNQMILFGEEDVRVANLKPRISFNFFVTAPKNVSDIIPRTEVEKAIRMSRSRINDAFRLNDNSLEFLGIQPTLGPPNQPPVS

SEQ ID NO: 10 - protein, 269 aa, Artificial
  amino acid sequence of a TcdA/B fusion polypeptide
MPSSVSWGILLLAGLCCLVPVSLAEDPMPSSVSWGILLLAGLCCLVPVSLAEDPFNLVTGWQTINGKKYYFDINTGAALISYKIINGKHFYFNNDGVMQLGVFKGPDGFEYFAPANTQNNNIEGQAIVYQSKFLTLNGKKYYFDQDSKAVTGWRIINNEKYYFNPNNAIAAVGLQVIDNNKYYFNPDTAIISKGWQTVQGSRYYFDTDTAIAFNGYKTIDGKHFYFDSDCVVKIGVFSTSNGFEYFAPANTYNNNIEGQAIVYQSKFLT

SEQ ID NO: 11 - protein, 7096 aa, Betacoronavirus SARS-CoV-2 [sequence omitted]

SEQ ID NO: 12 - protein, 1262 aa, Betacoronavirus SARS-CoV-2
MFVFLVLLPLVSSQCVNLTTRTQLPPAYTNSFTRGVYYPDKVFRSSVLHSTQDLFLPFFSNVTWFHAIHVSGTNGTKRFDNPVLPFNDGVYFASTEKSNIIRGWIFGTTLDSKTQSLLIVNNATNVVIKVCEFQFCNDPFLGVYYHKNNKSWMESEFRVYSSANNCTFEYVSQPFLMDLEGKQGNFKNLREFVFKNIDGYFKIYSKHTPINLVRDLPQGFSALEPLVDLPIGINITRFQTLLALHRSYLTPGDSSSGWTAGAAAYYVGYLQPRTFLLKYNENGTITDAVDCALDPLSETKCTLKSFTVEKGIYQTSNFRVQPTESIVRFPNITNLCPFGEVFNATRFASVYAWNRKRISNCVADYSVLYNSASFSTFKCYGVSPTKLNDLCFTNVYADSFVIRGDEVRQIAPGQTGKIADYNYKLPDDFTGCVIAWNSNNLDSKVGGNYNYLYRLFRKSNLKPFERDISTEIYQAGSTPCNGVEGFNCYFPLQSYGFQPTNGVGYQPYRVVVLSFELLHAPATVCGPKKSTNLVKNKCVNFNFNGLTGTGVLTESNKKFLPFQQFGRDIADTTDAVRDPQTLEILDITPCSFGGVSVITPGTNTSNQVAVLYQDVNCTEVPVAIHADQLTPTWRVYSTGSNVFQTRAGCLIGAEHVNNSYECDIPIGAGICASYQTQTNSPRRARSVASQSIIAYTMSLGAENSVAYSNNSIAIPTNFTISVTTEILPVSMTKTSVDCTMYICGDSTECSNLLLQYGSFCTQLNRALTGIAVEQDKNTQEVFAQVKQIYKTPPIKDFGGFNFSQILPDPSKPSKRSFIEDLLFNKVTLADAGFIKQYGDCLGDIAARDLICAQKFNGLTVLPPLLTDEMIAQYTSALLAGTITSGWTFGAGAALQIPFAMQMAYRFNGIGVTQNVLYENQKLIANQFNSAIGKIQDSLSSTASALGKLQDVVNQNAQALNTLVKQLSSNFGAISSVLNDILSRLDKVEAEVQIDRLITGRLQSLQTYVTQQLIRAAEIRASANLAATKMSECVLGQSKRVDFCGKGYHLMSFPQSAPHGVVFLHVTYVPAQEKNFTTAPAICHDGKAHFPREGVFVSNGTHWFVTQRNFYEPQIITTDNTFVSGNCDVVIGIVNNTVYDPLQPELDSFKEELDKYFKNHTSPDVDLGDISGINASVVNIQKEIDRLNEVAKNLNESLIDLQELGKYEQYIKWPWYIWLGFIAGLIAIVMVTIMLCCMTSCCSCLKGCCSCGSCCKFDEDDSE

SEQ ID NO: 13 - protein, 275 aa, Betacoronavirus SARS-CoV-2
MDLFMRIFTIGTVTLKQGEIKDATPSDFVRATATIPIQASLPFGWLIVGVALLAVFQSASKIITLKKRWQLALSKGVHFVCNLLLLFVTVYSHLLLVAAGLEAPFLYLYALVYFLQSINFVRIIMRLWLCWKCRSKNPLLYDANYFLCWHTNCYDYCIPYNSVTSSIVITSGDGTTSPISEHDYQIGGYTEKWESGVKDCVVLHSYFTSDYYQLYSTQLSTDTGVEHVTFFIYNKIVDEPEEHVQIHTIDGSSGVVNPVMEPIYDEPTTTTSVPL

SEQ ID NO: 14 - protein, 75 aa, Betacoronavirus SARS-CoV-2
MYSFVSEETGTLIVNSVLLFLAFVVFLLVTLAILTALRLCAYCCNIVNVSLVKPSFYVYSRVKNLNSSRVPDLLV

SEQ ID NO: 15 - protein, 218 aa, Betacoronavirus SARS-CoV-2
MADSNGTITVEELKKLLEQWNLVIGFLFLTWICLLQFAYANRNRFLYIIKLIFLWLLWPVTLACFVLAAVYRINWITGGIAIAMACLVGLMWLSYFIASFRLFARTRSMWSFNPETNILLNVPLHGTILTRPLLESELVIGAVILRGHLRIAGHHLGRCDIKDLPKEITVATSRTLSYYKLGASQRVAGDSGFAAYSRYRIGNYKLNTDHSSSSDNIA

SEQ ID NO: 16 - protein, 44 aa, Betacoronavirus SARS-CoV-2
MFHLVDFQVTIAEILLIIMRTFKVSIWNLDYIINLIIKNLSKSL

SEQ ID NO: 17 - protein, 121 aa, Betacoronavirus SARS-CoV-2
MKIILFLALITLATCELYHYQECVRGTTVLLKEPCSSGTYEGNSPFHPLADNKFALTCFSTQFAFACPDGVKHVYQLRARSVSPKLFIRQEEVQELYSPIFLIVAAIVFITLCFTLKRKTE

SEQ ID NO: 18 - protein, 121 aa, Betacoronavirus SARS-CoV-2
MKFLVFLGIITTVAAFHQECSLQSCTQHQPYVVDDPCPIHFYSKWYIRVGARKSAPLIELCVDEAGSKSPIQYIDIGNYTVSCSPFTINCQEPKLGSLVVRCSFYEDFLEYHDVRVVLDFI

SEQ ID NO: 19 - protein, 419 aa, Betacoronavirus SARS-CoV-2
MSDNGPQNQRNAPRITFGGPSDSTGSNQNGERSGARSKQRRPQGLPNNTASWFTALTQHGKEDLKFPRGQGVPINTNSSPDDQIGYYRRATRRIRGGDGKMKDLSPRWYFYYLGTGPEAGLPYGANKDGIIWVATEGALNTPKDHIGTRNPANNAAIVLQLPQGTTLPKGFYAEGSRGGSQASSRSSSRSRNSSRNSTPGSSRGTSPARMAGNGGDAALALLLLDRLNQLESKMSGKGQQQQGQTVTKKSAAEASKKPRQKRTATKAYNVTQAFGRRGPEQTQGNFGDQELIRQGTDYKHWPQIAQFAPSASAFFGMSRIGMEVTPSGTWLTYTGAIKLDDKDPNFKDQVILLNKHIDAYKTFPPTEPKKDKKKKADETQALPQRQKKQQTVTLLPAADLDDFSKQLQQSMSSADSTQA

SEQ ID NO: 20 - protein, 566 aa, Influenza virus
MKAKLLVLLCAFTATDADTICIGYHANNSTDTVDTVLEKNVTVTHSVNLLEDSHNGKLCKLKGIAPLQLGKCNIAGWILGNPECESLISKRSWSYIVETPNSENGTCYPGDFADYEELREQLSSVSSFERFEIFPKESSWPNHNVTKGVTAACSHAGKSSFYRNLLWLTEKNGSYPKLSKSYVNNKEKEVLVLWGVHHPSNITDQRTLYQNENAYVSVVSSHYNRRFTPEIAKRPKVRGQAGRINYYWTLLEPGDTIIFEANGNLIAPWYAFALSRGFGSGIITSNAPMHECDTKCQTPQGAINSSLPFQNVHPVTIGECPKYVRSTKLRMVTGLRNIPSIQSRGLFGAIAGFIEGGWTGMIDGWYGYHHQNEQGSGYAADQKSTQNAINGITNKVNSVIEKMNTQFTAVGKEFNKLEKRMENLNKKVDDGFLDIWTYNAELLVLLENERTLDFHDSNVKNLYEKVKSQLKNNAKEIGNGCFEFYHKCNNECMESVKNGTYDYPKYSEESKLNREKIDGVKLESMGVYQILAIYSTVASSLVLLVSLGAISFWMCSNGSLQCRICI

SEQ ID NO: 21 - protein, 562 aa, Influenza virus
MKVKLLILLCTFTATYADTICIGYHANNSTTYVDTITEDNVTVTHATELLESSHNGKLCNLPGVRPLDLGDCSIAGWLLGNPECDLLQNEEWSYIVERSNPANGWCYPGDFPDYEELRSLLASVSSFEKLEIIPEGFSWTNHTQNGGSGACKRGGKSSFFRNLNWLTKKGSTYPVLNVSYWNNDNEDKLYIWGVHHPSTDQEQTSLYQNASGYVSVSTSTSQQRIIPNIASRPTVRGQSGRISFYWTIVAPGDVIVFWSNGNLIAPRYWFKMNAGKSGIMKSDAPIGTCITKCQTPNGAINTSKPFQNVHPITIGECPKYVKSNRLKLATGLRNVPEKQTRGLFGAIAGFIEGGWQGMIDGWYGYHHQNPQGSGYAADLKSTQAAIDGITGKVNIVIEKMNTQFHAVGKEFNELECRIENLNKKVEDGFIDLWTYNAELLVLLENERTLDFHDSNVKNLYEKVRRQLRENAKEIGNGCFEFYHKCDNECMESVRNGTYDYPKYREEAKKNRFQIKGVKLKSGYKNQILWISFTTVSTLLLVVVLGGIFWCCGNGSLKCRICI

SEQ ID NO: 22 - protein, 863 aa, Clostridium difficile
FNLVTGWQTINGKKYYFDINTGAALISYKIINGKHFYFNNDGVMQLGVFKGPDGFEYFAPANTQNNNIEGQAIVYQSKFLTLNGKKYYFDQDSKAVTGWRIINNEKYYFNPNNAIAAVGLQVIDNNKYYFNPDTAIISKGWQTVQGSRYYFDTDTAIAFNGYKTIDGKHFYFDSDCVVKIGVFSTSNGFEYFAPANTYNNNIEGQAIVYQSKFLTLNGKKYYFDQNSKAVTGWQTIDSKKYYFNTNTAEAATGWQTIDGKKYYFNTNTAEAATGWQTIDGKKYYFNTNTAIASTGYTIINGKHFYFNTDGIMQIGVFKGPNGFEYFAPANTDANNIEGQAILYQNEFLTLNGKKYYFGSDSKAVTGWRIINNKKYYFNPNNAIAAIHLCTINNDKYYFSYDGILQNGYITIERNNFYFDANQESKMVTGVFKGPNGFEYFAPANTHNNNIEGQAIVYQNKFLTLNGKKYYFDQDSKAVTGWQTIDGKKYYFNLNTAEAATGWQTIDGKKYYFNLNTAEAATGWQTIDGKKYYFNTNTFIASTGYTSINGKHFYFNTDGIMQIGVFKGPNGFEYFAPANTHNNNIEGQAILYQNKFLTLNGKKYYFGSDSKAVTGLRTIDGKKYYFNTNTAVAVTGWQTINGKKYYFNTQTSIASTGYTIISGKHFYFNTDGIMQIGVFKGPDGFEYFAPANTDANNIEGQAIRYQNRFLYLHDNIYYFGQNSKAATGWVTIDGNRYYFEPNTAMGANGYKTIDNKNFYFRNGLPQIGVFKGSNGFEYFAPANTDANNIEGQAIRYQNRFLHLLGKIYYFGQNSKAVTGWQTINGKVYYFMPDTAMAAAGGLFEIDGVIYFFGVDGVKAPGIYG

SEQ ID NO: 23 - protein, 516 aa, Clostridium difficile
NLITGFVTVGDDKYYFNPINGGAASIGETIIDDKNYYFQQSGVLQTGVFSTEDGFKYFAPANTLDENLEGEAIDFTGKLIIDENIYYFDDNYRGAVEWKELDGEMHYFSPETGKAFKGLNQIGDYKYYFNSDGVMQKGFVSINDNKHYFDDSGVMKVGYTEIDGKHFYFAENGEMQIGVFNTEDGFKYFAHHNEDLGNEEGEEISYSGILNFNNKIYYFDDSFTAVVGWKDLEDGSKYYFDEDTAEAYIGLSLINDGQYYFNDDGIMQVGFVTINDKVFYFSDSGIIESGVQNIDDNYFYIDDNGIVQIGVFDTSDGYKYFAPANTVNDNIYGQAVEYSGLVRVGEDVYYFGETYTIETGWIYDMEQESDKYYFNPETKKACKGINLIDDIKYYFDEKGIMRTGLISFENNNYYFNENGEMQFGYINIEDKMFYFGEDGVMQIGVFNTPDGFKYFAHQNTLDENFEGESIQYTGWLDLDEKRYYFTDEYIAATGSVIIDGEEYYFDPDTAQLVISE

SEQ ID NO: 24 - DNA, 2589 bp, Clostridium difficile
tttaatctggtgacaggctggcagactatcaatgggaagaaatactatttcgacattaacaccggcgccgctctgatcagctacaagatcattaacgggaaacacttctacttcaacaatgacggagtgatgcagctgggcgtctttaagggccccgatgggttcgagtacttcgcacctgccaatacacagaacaataacattgaaggacaggccatcgtgtatcagtccaaattcctgactctgaacggcaagaaatactattttgaccaggattctaaggccgtcaccgggtggcgaatcattaataacgagaagtactacttcaaccccaataacgctattgcagccgtgggcctgcaggtcatcgacaataacaagtactatttcaaccctgatactgccatcatttccaaaggatggcagaccgtgcagggctctcgctactatttcgacaccgatacagccatcgccttcaacgggtacaagaccatcgacggaaaacatttctattttgactcagattgcgtggtcaagatcggcgtgttcagcacctccaacggcttcgagtactttgccccagctaacacatacaacaacaacatcgagggccaggccatcgtgtaccagagcaagttcctgaccctgaatggcaagaaatactacttcgaccagaactctaaggcagtcaccgggtggcagacaatcgatagtaagaagtactacttcaacactaacaccgccgaggctgcaactggctggcagaccatcgacgggaagaaatattatttcaatacaaacactgccgaagccgctacaggatggcagactattgacggcaagaaatattacttcaacaccaacacagcaatcgcctctacagggtacactatcattaatggaaagcacttctacttcaacactgatgggatcatgcagattggagtgttcaaaggaccaaatggcttcgagtactttgctcccgcaaacacagacgccaacaatattgagggccaggctatcctgtatcagaatgaattcctgacactgaacggcaagaaatattattttgggtctgatagtaaggctgtgactggctggaggatcattaacaataagaagtactatttcaaccccaacaacgcaatcgcagccattcacctgtgcaccattaacaatgacaagtactacttcagctacgacggcatcctgcagaatgggtatatcacaattgagcgcaacaatttctactttgacgccaaccaggaatccaagatggtgaccggcgtcttcaaagggcctaatggatttgaatatttcgccccagctaacacacataataacaatatcgaggggcaggctatcgtgtatcagaataagttcctgaccctgaacggcaagaaatactactttgaccaggatagcaaagccgtgaccggatggcagacaatcgatggcaagaaatattatttcaatctgaacacagccgaggccgcaactgggtggcagaccatcgatggaaagaaatactacttcaacctgaacactgctgaagccgctaccggatggcagactatcgacgggaagaaatactatttcaatactaacacctttattgcctctaccggatacacaagtatcaatggcaagcacttctacttcaacacggatggaatcatgcagattggcgtgttcaaaggccccaacggatttgaatactttgcacctgccaacactcataataacaatattgaaggccaggctatcctgtaccaaaataagttcctgaccctgaacgggaagaaatattacttcggatcagacagcaaagccgtgaccggcctgaggacaatcgatgggaagaaatattatttcaatacgaacactgctgtggcagtcactggatggcagaccattaatggcaagaaatattacttcaacacgcagacaagcatcgcctccactgggtacaccatcattagcggaaagcacttctacttcaacaccgacggcattatgcagatcggagtgttcaaaggccctgatggatttgagtactttgcccccgctaatacagatgcaaataacattgaaggccaggccatccgataccagaaccggttcctgtatctgcatgacaatatctactattttggccagaactccaaggcagccacaggctgggtgactatcgatgggaatcggtactatttcgagcctaatacagctatgggggcaaacggatacaagactatcgataacaagaacttctacttccggaatggcctgcctcagatcggggtgtttaagggcagcaacggattcgagtactttgcaccagccaacaccgacgccaataatattgaaggccaggcaatcagataccagaacaggttcctgcatctgctgggcaaaatctactacttcggccagaattccaaagcagtgactggctggcagacaatcaacggaaaggtctactacttcatgcctgacacagcaatggctgcagccggcggactgttcgagattgacggcgtgatctacttctttggagtggatggcgtcaaagcacctggaatctacgga

SEQ ID NO: 25 - DNA, 1548 bp, Clostridium difficile
aacctgatcactggattcgtgaccgtcggcgacgataagtactacttcaaccctattaacggaggcgctgcatccatcggcgagaccatcatcgacgataagaactactacttccagcagagtggggtgctgcagacaggagtcttctcaactgaggacggcttcaagtactttgctccagcaaataccctggatgaaaacctggagggagaagccattgactttacaggcaagctgatcatcgatgaaaacatctactacttcgacgataactaccgcggagctgtggagtggaaagaactggacggcgagatgcactatttctctccagaaaccggcaaggccttcaaggggctgaatcagatcggagactacaagtactatttcaacagcgatggcgtgatgcagaaggggtttgtctccatcaatgacaacaaacactacttcgacgatagcggagtgatgaaggtcggctacaccgagattgatggcaaacatttctattttgctgagaatggggaaatgcaaatcggagtgttcaacacagaagatggcttcaagtactttgcccaccataatgaggacctgggcaacgaggaaggggaggaaatttcctactctggcatcctgaacttcaacaacaaaatctactatttcgacgatagcttcaccgcagtggtgggatggaaggacctggaggatggaagcaaatactattttgacgaggataccgccgaagcttacattggcctgtccctgatcaatgacgggcagtactacttcaacgacgatggcattatgcaagtggggttcgtcaccatcaacgacaaggtgttctactttagtgattcaggaatcattgagtctggcgtccagaatattgacgataactacttctatatcgacgataatgggatcgtgcagattggagtcttcgacaccagcgatgggtacaagtattttgcacccgccaacaccgtgaatgacaacatctacggccaggccgtcgagtattcaggcctggtgcgggtcggggaagacgtgtactatttcggcgagacttacaccattgaaacagggtggatctatgacatggagcaagaaagtgataagtactatttcaatcctgagactaagaaagcctgcaaaggcatcaacctgattgacgatatcaagtactacttcgatgagaagggaatcatgagaaccggcctgatcagcttcgaaaacaataactactacttcaacgagaacggggaaatgcagttcggatacatcaacatcgaggacaagatgttctacttcggggaagatggagtgatgcagatcggagtctttaacacacccgacggcttcaaatactttgcccaccagaatactctggatgagaacttcgagggggaatctatccagtacaccggatggctggacctggatgagaagaggtactatttcaccgacgagtacatcgccgctacaggcagtgtgattatcgacggcgaggagtattacttcgatcccgacaccgctcagctggtcatctcagag

SEQ ID NO: 26 - DNA, 36201 bp, Betacoronavirus SARS-CoV-2
  misc_feature (7190)..(7190): n is a, c, g, or t
  misc_feature (21091)..(21091): n is a, c, g, or t
  misc_feature (24027)..(24027): n is a, c, g, or t
  misc_feature (34791)..(34791): n is a, c, g, or t
cgccatcatcaataatataccttattttggattgaagccaatatgataatgagggggtggagtttgtgacgtggcgcggggcgtgggaacggggcgggtgacgtagtagtgtggcggaagtgtgatgttgtaagtgtggcggaacacatgtaagcgccggatgtggtaaaagtgacgtttttggtgtgcgccggtgtacacgggaagtgacaattttcgcgcggttttaggcggatgttgtagtaaatttgggcgtaaccaagtaatatttggccattttcgcgggaaaactgaataagaggaagtgaaatctgaataattctgtgttactcatagcgcgtaatatttgtctagggccgcggggactttgaccgtttacgtggagactcgcccaggtgtttttctcaggtgttttccgcgttccgggtcaaagttggcgttttattattatagtcagctgacgcgcagtgtatttatacccggtgagttcctcaagaggccactcttgagtgccagcgagtagagttttctcctccgagccgctccgacaccgggactgaaaatgagacatattatctgccacggaggtgttattaccgaagaaatggccgccagtcttttggaccagctgatcgaagaggtactggctgataatcttccacctcctagccattttgaaccacctacccttcacgaactgtatgatttagacgtgacggcccccgaagatcccaacgaggaggcggtttcgcagatttttcccgagtctgtaatgttggcggtgcaggaagggattgacttattcacttttccgccggcgcccggttctccggagccgcctcacctttcccggcagcccgagcagccggagcagagagccttgggtccggtttctatgccaaaccttgtgccggaggtgatcgatcttacctgccacgaggctggctttccacccagtgacgacgaggatgaagagggtgaggagtttgtgttagattatgtggagcaccccgggcacggttgcaggtcttgtcattatcaccggaggaatacgggggacccagatattatgtgttcgctttgctatatgaggacctgtggcatgtttgtctacagtaagtgaaaaattatgggcagtgggtgatagagtggtgggtttggtgtggtaattttttttttaatttttacagttttgtggtttaaagaattttgtattgtgattttttaaaaggtcctgtgtctgaacctgagcctgagcccgagccagaaccggagcctgcaagacctacccggcgtcctaaattggtgcctgctatcctgagacgcccgacatcacctgtgtctagagaatgcaatagtagtacggatagctgtgactccggtccttctaacacacctcctgagatacacccggtggtcccgctgtgccccattaaaccagttgccgtgagagttggtgggcgtcgccaggctgtggaatgtatcgaggacttgcttaacgagtctgggcaacctttggacttgagctgtaaacgccccaggccataaggtgtaaacctgtgattgcgtgtgtggttaacgcctttgtttgctgaatgagttgatgtaagtttaataaagggtgagataatgtttaacttgcatggcgtgttaaatggggcggggcttaaagggtatataatgcgccgtgggctaatcttggttacatctgacctcatggaggcttgggagtgtttggaagatttttctgctgtgcgtaacttgctggaacagagctctaacagtacctcttggttttggaggtttctgtggggctcctcccaggcaaagttagtctgcagaattaaggaggattacaagtgggaatttgaagagcttttgaaatcctgtggtgagctgtttgattctttgaatctgggtcaccaggcgcttttccaagagaaggtcatcaagactttggatttttccacaccggggcgcgctgcggctgctgttgcttttttgagttttataaaggataaatggagcgaagaaacccatctgagcggggggtacctgctggattttctggccatgcatctgtggagagcggtggtgagacacaagaatcgcctgctactgttgtcttccgtccgcccggcaataataccgacggaggagcaacagcaggaggaagccaggcggcggcggcggcaggagcagagcccatggaacccgagagccggcctggaccctcgggaatgaatgttgtacaggtggctgaactgtttccagaactgagacgcattttaaccattaacgaggatgggcaggggctaaagggggtaaagagggagcggggggcttctgaggctacagaggaggctaggaatctaacttttagcttaatgaccagacaccgtcctgagtgtgttacttttcagcagattaaggataattgcgctaatgagcttgatctgctggcgcagaagtattccataaagcagctgaccacttactggctgcagccaggggatgattttgaggaggctattagggtatatgcaaaggtggcacttaggccagattgcaagtacaagattagcaaacttgtaaatatcaggaattgttgctacatttctgggaacggggccgaggtggagatagatacggaggatagggtggcctttagatgtagcatgataaatatgtggccgggggtgcttggcatggacggggtggttattatgaatgtgaggtttactggtcccaattttagcggtacggttttcctggccaataccaatcttatcctacacggtgtaagcttctatgggtttaacaatacctgtgtggaagcctggaccgatgtaagggttcggggctgtgccttttactgctgctggaagggggtggtgtgtcgccccaaaagcagggcttcaattaagaaatgcctgtttgaaaggtgtaccttgggtatcctgtctgagggtaactccagggtgcgccacaatgtggcctccgactgtggttgctttatgctagtgaaaagcgtggctgtgattaagcataacatggtgtgtggcaactgcgaggacagggcctctcagatgctgacctgctcggacggcaactgtcacttgctgaagaccattcacgtagccagccactctcgcaaggcctggccagtgtttgagcacaacatactgacccgctgttccttgcatttgggtaacaggaggggggtgttcctaccttaccaatgcaatttgagtcacactaagatattgcttgagcccgagagcatgtccaaggtgaacctgaacggggtgtttgacatgaccatgaagatctggaaggtgctgaggtacgatgagacccgcaccaggtgcagaccctgcgagtgtggcggtaaacatattaggaaccagcctgtgatgctggatgtgaccgaggagctgaggcccgatcacttggtgctggcctgcacccgcgctgagtttggctctagcgatgaagatacagattgaggtactgaaatgtgtgggcgtggcttaagggtgggaaagaatatataaggtgggggtctcatgtagttttgtatctgttttgcagcagccgccgccatgagcgccaactcgtttgatggaagcattgtgagctcatatttgacaacgcgcatgcccccatgggccggggtgcgtcagaatgtgatgggctccagcattgatggtcgccccgtcctgcccgcaaactctactaccttgacctacgagaccgtgtctggaacgccgttggagactgcagcctccgccgccgcttcagccgctgcagccaccgcccgcgggattgtgactgactttgctttcctgagcccgcttgcaagcagtgcagcttcccgttcatccgcccgcgatgacaagttgacggctcttttggcacaattggattctttgacccgggaacttaatgtcgtttctcagcagctgttggatctgcgccagcaggtttctgccctgaaggcttcctcccctcccaatgcggtttaaaacataaataaaaaccagactctgtttggatttggatcaagcaagtgtcttgctgtctttatttaggggttttgcgcgcgcggtaggcccgggaccagcggtctcggtcgttgagggtcctgtgtattttttccaggacgtggtaaaggtgactctggatgttcagatacatgggcataagcccgtctctggggtggaggtagcaccactgcagagcttcatgctgcggggtggtgttgtagatgatccagtcgtagcaggagcgctgggcgtggtgcctaaaaatgtctttcagtagcaagctgattgccaggggcaggcccttggtgtaagtgtttacaaagcggttaagctgggatgggtgcatacgtggggatatgagatgcatcttggactgtatttttaggttggctatgttcccagccatatccctccggggattcatgttgtgcagaaccaccagcacagtgtatccggtgcacttgggaaatttgtcatgtagcttagaaggaaatgcgtggaagaacttggagacgcccttgtgacctccaagattttccatgcattcgtccataatgatggcaatgggcccacgggcggcggcctgggcgaagatatttctgggatcactaacgtcatagttgtgttccaggatgagatcgtcataggccatttttacaaagcgcgggcggagggtgccagactgcggtataatggttccatccggcccaggggcgtagttaccctcacagatttgcatttcccacgctttgagttcagatggggggatcatgtctacctgcggggcgatgaagaaaaccgtttccggggtaggggagatcagctgggaagaaagcaggttcctaagcagctgcgacttaccgcagccggtgggcccgtaaatcacacctattaccggctgcaactggtagttaagagagctgcagctgccgtcatccctgagcaggggggccacttcgttaagcatgtccctgacttgcatgttttccctgaccaaatccgccagaaggcgctcgccgcccagcgatagcagttcttgcaaggaagcaaagtttttcaacggtttgaggccgtccgccgtaggcatgcttttgagcgtttgaccaagcagttccaggcggtcccacagctcggtcacgtgctctacggcatctcgatccagcatatctcctcgtttcgcgggttggggcggctttcgctgtacggcagtagtcggtgctcgtccagacgggccagggtcatgtctttccacgggcgcagggtcctcgtcagcgtagtctgggtcacggtgaaggggtgcgctccgggttgcgcgctggccagggtgcgcttgaggctggtcctgctggtgctgaagcgctgccggtcttcgccctgcgcgtcggccaggtagcatttgaccatggtgtcatagtccagcccctccgcggcgtggcccttggcgcgcagcttgcccttggaggaggcgccgcacgaggggcagtgcagacttttaagggcgtagagcttgggcgcgagaaataccgattccggggagtaggcatccgcgccgcaggccccgcagacggtctcgcattccacgagccaggtgagctctggccgttcggggtcaaaaaccaggtttcccccatgctttttgatgcgtttcttacctctggtttccatgagccggtgtccacgctcggtgacgaaaaggctgtccgtgtccccgtatacagacttgagaggcctgtcctcgagcggtgttccgcggtcctcctcgtatagaaactcggaccactctgagacgaaggctcgcgtccaggccagcacgaaggaggctaagtgggaggggtagcggtcgttgtccactagggggtccactcgctccagggtgtgaagacacatgtcgccctcttcggcatcaaggaaggtgattggtttataggtgtaggccacgtgaccgggtgttcctgaaggggggctataaaagggggtgggggcgcgttcgtcctcactctcttccgcatcgctgtctgcgagggccagctgttggggtgagtactccctctcaaaagcgggcatgacttctgcgctaagattgtcagtttccaaaaacgaggaggatttgatattcacctggcccgcggtgatgcctttgagggtggccgcgtccatctggtcagaaaagacaatctttttgttgtcaagcttggtggcaaacgacccgtagagggcgttggacagcaacttggcgatggagcgcagggtttggtttttgtcgcgatcggcgcgctccttggccgcgatgtttagctgcacgtattcgcgcgcaacgcaccgccattcgggaaagacggtggtgcgctcgtcgggcactaggtgcacgcgccaaccgcggttgtgcagggtgacaaggtcaacgctggtggctacctctccgcgtaggcgctcgttggtccagcagaggcggccgcccttgcgcgagcagaatggcggtagtgggtctagctgcgtctcgtccggggggtctgcgtccacggtaaagaccccgggcagcaggcgcgcgtcgaagtagtctatcttgcatccttgcaagtctagcgcctgctgccatgcgcgggcggcaagcgcgcgctcgtatgggttgagtgggggaccccatggcatggggtgggtgagcgcggaggcgtacatgccgcaaatgtcgtaaacgtagaggggctctctgagtattccaagatatgtagggtagcatcttccaccgcggatgctggcgcgcacgtaatcgtatagttcgtgcgagggagcgaggaggtcgggaccgaggttgctacgggcgggctgctctgctcggaagactatctgcctgaagatggcatgtgagttggatgatatggttggacgctggaagacgttgaagctggcgtctgtgagacctaccgcgtcacgcacgaaggaggcgtaggagtcgcgcagcttgttgaccagctcggcggtgacctgcacgtctagggcgcagtagtccagggtttccttgatgatgtcatacttatcctgtcccttttttttccacagctcgcggttgaggacaaactcttcgcggtctttccagtactcttggatcggaaacccgtcggcctccgaacggtaagagcctancatgtagaactggttgacggcctggtaggcgcagcatcccttttctacgggtagcgcgtatgcctgcgcggccttccggagcgaggtgtgggtgagcgcaaaggtgtccctaaccatgactttgaggtactggtatttgaagtcagtgtcgtcgcatccgccctgctcccagagcaaaaagtccgtgcgctttttggaacgcgggtttggcagggcgaaggtgacatcgttgaagagtatctttcccgcgcgaggcataaagttgcgtgtgatgcggaagggtcccggcacctcggaacggttgttaattacctgggcggcgagcacgatctcgtcaaagccgttgatgttgtggcccacaatgtaaagttccaagaagcgcgggatgcccttgatggaaggcaattttttaagttcctcgtaggtgagctcttcaggggagctgagcccgtgctctgaaagggcccagtctgcaagatgagggttggaagcgacgaatgagctccacaggtcacgggccattagcatttgcaggtggtcgcgaaaggtcctaaactggcgacctatggccattttttctggggtgatgcagtagaaggtaagcgggtcttgttcccagcggtcccatccaaggtccgcggctaggtctcgcgcggcggtcactagaggctcatctccgccgaacttcatgaccagcatgaagggcacgagctgcttcccaaaggcccccatccaagtataggtctctacatcgtaggtgacaaagagacgctcggtgcgaggatgcgagccgatcgggaagaactggatctcccgccaccagttggaggagtggctgttgatgtggtgaaagtagaagtccctgcgacgggccgaacactcgtgctggcttttgtaaaaacgtgcgcagtactggcagcggtgcacgggctgtacatcctgcacgaggttgacctgacgaccgcgcacaaggaagcagagtgggaatttgagcccctcgcctggcgggtttggctggtggtcttctacttcggctgcttgtccttgaccgtctggctgctcgaggggagttacggtggatcggaccaccacgccgcgcgagcccaaagtccagatgtccgcgcgcggcggtcggagcttgatgacaacatcgcgcagatgggagctgtccatggtctggagctcccgcggcgtcaggtcaggcgggagctcctgcaggtttacctcgcatagccgggtcagggcgcgggctaggtccaggtgatacctgatttccaggggctggttggtggcggcgtcgatggcttgcaagaggccgcatccccgcggcgcgactacggtaccgcgcggcgggcggtgggccgcgggggtgtccttggatgatgcatctaaaagcggtgacgcgggcgggcccccggaggtagggggggctcgggacccgccgggagagggggcaggggcacgtcggcgccgcgcgcgggcaggagctggtgctgcgcgcggaggttgctggcgaacgcgacgacgcggcggttgatctcctgaatctggcgcctctgcgtgaagacgacgggcccggtgagcttgaacctgaaagagagttcgacagaatcaatttcggtgtcgttgacggcggcctggcgcaaaatctcctgcacgtctcctgagttgtcttgataggcgatctcggccatgaactgctcgatctcttcctcctggagatctccgcgtccggctcgctccacggtggcggcgaggtcgttggagatgcgggccatgagctgcgagaaggcgttgaggcctccctcgttccagacgcggctgtagaccacgcccccttcggcatcgcgggcgcgcatgaccacctgcgcgagattgagctccacgtgccgggcgaagacggcgtagtttcgcaggcgctgaaagaggtagttgagggtggtggcggtgtgttctgccacgaagaagtacataacccagcgccgcaacgtggattcgttgatatcccccaaggcctcaaggcgctccatggcctcgtagaagtccacggcgaagttgaaaaactgggagttgcgcgccgacacggttaactcctcctccagaagacggatgagctcggcgacagtgtcgcgcacctcgcgctcaaaggctacaggggcctcttcttcttcttcaatctcctcttccataagggcctccccttcttcttcttctggcggcggtgggggaggggggacacggcggcgacgacggcgcaccgggaggcggtcgacaaagcgctcgatcatctccccgcggcgacggcgcatggtctcggtgacggcgcggccgttctcgcgggggcgcagttggaagacgccgcccgtcatgtcccggttatgggttggcggggggctgccgtgcggcagggatacggcgctaacgatgcatctcaacaattgttgtgtaggtactccgccaccgagggacctgagcgagtccgcatcgaccggatcggaaaacctctcgagaaaggcgtctaaccagtcacagtcgcaaggtaggctgagcaccgtggcgggcggcagcgggcggcggtcggggttgtttctggcggaggtgctgctgatgatgtaattaaagtaggcggtcttgagacggcggatggtcgacagaagcaccatgtccttgggtccggcctgctgaatgcgcaggcggtcggccatgccccaggcttcgttttgacatcggcgcaggtctttgtagtagtcttgcatgagcctttctaccggcacttcttcttctccttcctcttgtcctgcatctcttgcatctatcgctgcggcggcggcggagtttggccgtaggtggcgccctcttcctcccatgcgtgtgaccccgaagcccctcatcggctgaagcagggccaggtcggcgacaacgcgctcggctaatatggcctgctgcacctgcgtgagggtagactggaagtcgtccatgtccacaaagcggtggtatgcgcccgtgttgatggtgtaagtgcagttggccataacggaccagttaacggtctggtgacccggctgcgagagctcggtgtacctgagacgcgagtaagcccttgagtcaaagacgtagtcgttgcaagtccgcaccaggtactggtatcccaccaaaaagtgcggcggcggctggcggtagaggggccagcgtagggtggccggggctccgggggcgaggtcttccaacataaggcgatgatatccgtagatgtacctggacatccaggtgatgccggcggcggtggtggaggcgcgcggaaagtcacggacgcggttccagatgttgcgcagcggcaaaaagtgctccatggtcgggacgctctggccggtcaggcgcgcgcagtcgttgacgctctagaccgtgcaaaaggagagcctgtaagcgggcactcttccgtggtctggtggataaattcgcaagggtatcatggcggacgaccggggttcgaaccccggatccggccgtccgccgtgatccatgcggttaccgcccgcgtgtcgaacccaggtgtgcgacgtcagacaacgggggagcgctccttttggcttccttccaggcgcggcggatgctgcgctagcttttttggccactggccgcgcgcggcgtaagcggttaggctggaaagcgaaagcattaagtggctcgctccctgtagccggagggttattttccaagggttgagtcgcgggacccccggttcgagtctcgggccggccggactgcggcgaacgggggtttgcctccccgtcatgcaagaccccgcttgcaaattcctccggaaacagggacgagccccttttttgcttttcccagatgcatccggtgctgcggcagatgcgcccccctcctcagcagcggcaagagcaagagcagcggcagacatgcagggcaccctcccctcctcctaccgcgtcaggaggggcgacatccgcggttgacgcggcagcagatggtgattacgaacccccgcggcgccgggcccggcactacctggacttggaggagggcgagggcctggcgcggctaggagcgccctctcctgagcggtacccaagggtgcagctgaagcgtgatacgcgtgaggcgtacgtgccgcggcagaacctgtttcgcgaccgcgagggagaggagcccgaggagatgcgggatcgaaagttccacgcagggcgcgagctgcggcatggcctgaatcgcgagcggttgctgcgcgaggaggactttgagcccgacgcgcgaaccgggattagtcccgcgcgcgcacacgtggcggccgccgacctggtaaccgcatacgagcagacggtgaaccaggagattaactttcaaaaaagctttaacaaccacgtgcgtacgcttgtggcgcgcgaggaggtggctataggactgatgcatctgtgggactttgtaagcgcgctggagcaaaacccaaatagcaagccgctcatggcgcagctgttccttatagtgcagcacagcagggacaacgaggcattcagggatgcgctgctaaacatagtagagcccgagggccgctggctgctcgatttgataaacatcctgcagagcatagtggtgcaggagcgcagcttgagcctggctgacaaggtggccgccatcaactattccatgcttagcctgggcaagttttacgcccgcaagatataccataccccttacgttcccatagacaaggaggtaaagatcgaggggttctacatgcgcatggcgctgaaggtgcttaccttgagcgacgacctgggcgtttatcgcaacgagcgcatccacaaggccgtgagcgtgagccggcggcgcgagctcagcgaccgcgagctgatgcacagcctgcaaagggccctggctggcacgggcagcggcgatagagaggccgagtcctactttgacgcgggcgctgacctgcgctgggccccaagccgacgcgccctggaggcagctggggccggacctgggctggcggtggcacccgcgcgcgctggcaacgtcggcggcgtggaggaatatgacgaggacgatgagtacgagccagaggacggcgagtactaagcggtgatgtttctgatcagtcgcggccgcgatatcgctagcgaagttcctattctctagaaagtataggaacttcggatcctctagagtcgaaaaaaaaaaagcatgatgcaaaataaaaaactcaccaaggccatggcaccgagcgttggttttcttgtattccccttagtatgcggcgcgcggcgatgtatgaggaaggtcctcctccctcctacgagagtgtggtgagcgcggcgccagtggcggcggcgctgggttctcccttcgatgctcccctggacccgccgtttgtgcctccgcggtacctgcggcctaccggggggagaaacagcatccgttactctgagttggcacccctattcgacaccacccgtgtgtacctggtggacaacaagtcaacggatgtggcatccctgaactaccagaacgaccacagcaactttctgaccacggtcattcaaaacaatgactacagcccgggggaggcaagcacacagaccatcaatcttgacgaccggtcgcactggggcggcgacctgaaaaccatcctgcataccaacatgccaaatgtgaacgagttcatgtttaccaataagtttaaggcgcgggtgatggtgtcgcgcttgcctactaaggacaatcaggtggagctgaaatacgagtgggtggagttcacgctgcccgagggcaactactccgagaccatgaccatagaccttatgaacaacgcgatcgtggagcactacttgaaagtgggcagacagaacggggttctggaaagcgacatcggggtaaagtttgacacccgcaacttcagactggggtttgaccccgtcactggtcttgtcatgcctggggtatatacaaacgaagccttccatccagacatcattttgctgccaggatgcggggtggacttcacccacagccgcctgagcaacttgttgggcatccgcaagcggcaacccttccaggagggctttaggatcacctacgatgatctggagggtggtaacattcccgcactgttggatgtggacgcctaccaggcgagcttgaaagatgacaccgaacagggcgggggtggcgcaggcggcagcaacagcagtggcagcggcgcggaagagaactccaacgcggcagccgcggcaatgcagccggtggaggacatgaacgatcatgccattcgcggcgacacctttgccacacgggctgaggagaagcgcgctgaggccgaagcagcggccgaagctgccgcccccgctgcgcaacccgaggtcgagaagcctcagaagaaaccggtgatcaaacccctgacagaggacagcaagaaacgcagttacaacctaataagcaatgacagcaccttcacccagtaccgcagctggtaccttgcatacaactacggcgaccctcagaccggaatccgctcatggaccctgctttgcactcctgacgtaacctgcggctcggagcaggtctactggtcgttgccagacatgatgcaagaccccgtgaccttccgctccacgcgccagatcagcaactttccggtggtgggcgccgagctgttgcccgtgcactccaagagcttctacaacgaccaggccgtctactcccaactcatccgccagtttacctctctgacccacgtgttcaatcgctttcccgagaaccagattttggcgcgcccgccagcccccaccatcaccaccgtcagtgaaaacgttcctgctctcacagatcacgggacgctaccgctgcgcaacagcatcggaggagtccagcgagtgaccattactgacgccagacgccgcacctgcccctacgtttacaaggccctgggcatagtctcgccgcgcgtcctatcgagccgcactttttgagcaagcatgtccatccttatatcgcccagcaataacacaggctggggcctgcgcttcccaagcaagatgtttggcggggccaagaagcgctccgaccaacacccagtgcgcgtgcgcgggcactaccgcgcgccctggggcgcgcacaaacgcggccgcactgggcgcaccaccgtcgatgacgccatcgacgcggtggtggaggaggcgcgcaactacacgcccacgccgccgccagtgtccaccgtggacgcggccattcagaccgtggtgcgcggagcccggcgctacgctaaaatgaagagacggcggaggcgcgtagcacgtcgccaccgccgccgacccggcactgccgcccaacgcgcggcggcggccctgcttaaccgcgcacgtcgcaccggccgacgggcggccatgcgagccgctcgaaggctggccgcgggtattgtcactgtgccccccaggtccaggcgacgagcggccgccgcagcagccgcggccattagtgttatgactcagggtcgcaggggcaacgtgtactgggtgcgcgactcggttagcggcctgcgcgtgcccgtgcgcacccgccccccgcgcaactagattgcaataaaaaactacttagactcgtactgttgtatgtatccagcggcggcggcgcgcatcgaagctatgtccaagcgcaaaatcaaagaagagatgctccaggtcatcgcgccggagatctatggccccccgaagaaggaagagcaggattacaagccccgaaagctaaagcgggtcaaaaagaaaaagaaagatgatgatgatgatgaacttgacgacgaggtggaactgttgcacgcgaccgcgcccaggcgacgggtacagtggaaaggtcgacgcgtaagacgtgttttgcgacccggcaccaccgtagtctttacgcccggtgagcgctccacccgcacctacaagcgcgtgtatgatgaggtgtacggcgacgaggacctgcttgagcaggccaacgagcgcctcggggagtttgcctacggaaagcggcataaggacatgctggcgttgccgctggacgagggcaacccaacacctagcctaaagcccgtgacactgcagcaggtgctgcccgcgcttgcaccgtccgaagaaaagcgcggcctaaagcgcgagtctggtgacttggcacccaccgtgcagctgatggtacccaagcgtcagcgactggaagatgtcttggaaaaaatgaccgtggagcctgggctggagcccgaggtccgcgtgcggccaatcaagcaggtggcaccgggactgggcgtgcagaccgtggacgttcagatacccaccaccagtagcactagtattgccactgccacagagggcatggagacacaaacgtccccggttgcctcggcggtggcagatgccgcggtgcaggcggccgctgcggccgcgtccaagacctctacggaggtgcaaacggacccgtggatgtttcgtgtttcagccccccggcgtccgcgccgttcaaggaagtacggcgccgccagcgcgctactgcccgaatatgccctacatccttccatcgcgcctacccccggctatcgtggctacacctaccgccccagaagacgagcaactacccgacgccgaaccaccactggaacccgccgccgccgtcgccgtcgccagcccgtgctggccccgatttccgtgcgcagggtggctcgcgaaggaggcaggaccctggtgctgccaacagcgcgctaccaccccagcatcgtttaaaagccggtctttgtggttcttgcagatatggccctcacctgccgcctccgtttcccggtgccgggattccgaggaagaatgcaccgtaggaggggcatggccggccacggcctgacgggcggcatgcgtcgtgcgcaccaccggcggcggcgcgcgtcgcaccgtcgcatgcgcgccggtatcctgcccctccttattccactgatcgccgcggcgattggcgccgtgcccggaattgcatccgtggccttgcaggcgcagagacactgattaaaaacaagttacatgtggaaaaatcaaaataaaagtctggactctcacgctcgcttggtcctgtaactattttgtagaatggaagacatcaactttgcgtcactggccccgcgacacggctcgcgcccgttcatgggaaactggcaagatatcggcaccagcaatatgagcggtggcgccttcagctggggctcgctgtggagcggcattaaaaatttcggttccgccgttaagaactatggcagcaaagcctggaacagcagcacaggccagatgctgagggacaagttgaaagagcaaaatttccaacaaaaggtggtagatggcctggcctctggcattagcggggtggtggacctggccaaccaggcagtgcaaaataagattaacagtaagcttgatccccgccctcccgtagaggagcctccaccggccgtggagacagtgtctccagaggggcgtggcgaaaagcgtccgcgacccgacagggaagaaactctggtgacgcaaatagacgagcctccctcgtacgaggaggcactaaagcaaggcctgcccaccacccgtcccatcgcgcccatggctaccggagtgctgggccagcacacacccgtaacgctggacctgcctccccccgccgacacccagcagaaacctgtgctgccaggcccgtccgccgttgttgtaacccgtcctagccgcgggtccctgcgccgcgccgccagcggtccgcgatcgttgcggcccgtagccagtggcaactggcaaagcacactgaacagcatcgtgggtttgggggtgcaatccctgaagcgccgacgatgcttctgatagctaacgtgtcgtatgtgtgtcatgtatgcgtccatgtcgccgccagaggagctgctgagccgccgcgcgcccgctttccaagatggctaccccttcgatgatgccgcagtggtcttacatgcacatctcgggccaggacgcctcggagtacctgagccccgggctggtgcagttcgcccgcgccaccgagacgtacttcagcctgaataacaagtttagaaaccccacggtggcgcctacgcacgacgtgaccacagaccggtctcagcgtttgacgctgcggttcatccccgtggaccgcgaggatactgcgtactcgtacaaggcgcggttcaccctagctgtgggtgataaccgtgtgctagacatggcttccacgtactttgacatccgcggcgtgctggacaggggccctacttttaagccctactctggcactgcctacaacgcactggcccccaagggtgcccccaactcgtgcgagtgggaacaaaatgaaactgcacaagtggatgctcaagaacttgacgaagaggagaatgaagccaatgaagctcaggcgcgagaacaggaacaagctaagaaaacccatgtatatgcccaggctccactgtccggaataaaaataactaaagaaggtctacaaataggaactgccgacgccacagtagcaggtgccggcaaagaaattttcgcagacaaaacttttcaacctgaaccacaagtaggagaatctcaatggaacgaagcggatgccacagcagctggtggaagggttcttaaaaagacaactcccatgaaaccctgctatggctcatacgctagacccaccaattccaacggcggacagggcgttatggttgaacaaaatggtaaattggaaagtcaagtcgaaatgcaatttttttccacatccacaaatgccacaaatgaagttaacaatatacaaccaacagttgtattgtacagcgaagatgtaaacatggaaactccagatactcatctttcttataaacctaaaatgggggataaaaatgccaaagtcatgcttggacaacaagcaatgccaaacagaccaaattacattgcttttagagacaattttattggtctcatgtattacaacagcacaggtaacatgggtgtccttgctggtcaggcatcgcagttgaacgctgttgtagatttgcaagacagaaacacagagctgtcctaccagcttttgcttgattcaattggcgacagaacaagatacttttcaatgtggaatcaagctgttgacagctatgatccagatgtcagaattattgagaaccatggaactgaggatgagttgccaaattattgctttcctcttggtggaattgggattactgacacttttcaagctgttaaaacaactgctgctaacggggaccaaggcaatactacctggcaaaaagattcaacatttgcagaacgcaatgaaataggggtgggaaataactttgccatggaaattaacctgaatgccaacctatggagaaatttcctttactccaatattgcgctgtacctgccagacaagctaaaatacaaccccaccaatgtggaaatatctgacaaccccaacacctacgactacatgaacaagcgagtggtggctcctgggcttgtagactgctacattaaccttggggcgcgctggtctctggactacatggacaacgttaatccctttaaccacccccgccatgcgggcctgcgttaccgctccatgttgttgggaaacggccgctacgtgccctttcacattcaggtgccccaaaagttttttgccattaaaaacctcctcctcctgccaggctcatacacatatgaatggaacttcaggaaggatgttaacatggttctgcagagctctctgggaaacgaccttagagttgacggggctagcattaagtttgacagcatttgtctttacgccaccttcttccccatggcccacaacacggcctccacgctggaagccatgctcagaaatgacaccaacgaccagtcctttaatgactacctttccgccgccaacatgctatatcccatacccgccaacgccaccaacgtgcccatctccatcccatcgcgcaactgggcagcatttcgcggttgggccttcacacgcttgaagacaaaggaaaccccttccctgggatcaggctacgacccttactacacctactctggctccataccataccttgacggaaccttctatcttaatcacacctttaagaaggtggccattacttttgactcttctgttagctggccgggcaacgaccgcctgcttactcccaatgagtttgagattaagcgctcagttgacggggagggctataacgtagctcagtgcaacatgacaaaggactggttcctagtgcagatgttggccaactacaatattggctaccagggcttctacattccagaaagctacaaagaccgcatgtactcgttcttcagaaacttccagcccatgagccggcaagtggtggacgatactaaatacaaagattatcagcaggttggaattatccaccagcataacaactcaggcttcgtaggctacctcgctcccaccatgcgcgagggacaagcttaccccgctaatgttccctacccactaataggcaaaaccgcggttgatagtattacccagaaaaagtttctttgcgaccgcaccctgtggcgcatccccttctccagtaactttatgtccatgggtgcgctcacagacctgggccaaaaccttctctacgcaaactccgcccacgcgctagacatgacctttgaggtggatcccatggacgagcccacccttctttatgttttgtttgaagtctttgacgtggtccgtgtgcaccagccgcaccgcggcgtcatcgagaccgtgtacctgcgcacgcccttctcggccggcaacgccacaacataaagaagcaagcaacatcaacaacagctgccgccatgggctccagtgagcaggaactgaaagccattgtcaaagatcttggttgtgggccatattttttgggcacctatgacaagcgcttcccaggctttgtttccccacacaagctcgcctgcgccatagttaacacggccggtcgcgagactgggggcgtacactggatggcctttgcctggaacccgcgctcaaaaacatgctacctctttgagccctttggcttttctgaccaacgtctcaagcaggtttaccagtttgagtacgagtcactcctgcgccgtagcgccattgcctcttcccccgaccgctgtataacgctggaaaagtccacccaaagcgtgcaggggcccaactcggccgcctgtggcctattctgctgcatgtttctccacgcctttgccaactggccccaaactcccatggatcacaaccccaccatgaaccttattaccggggtacccaactccatgcttaacagtccccaggtacagcccaccctgcgccgcaaccaggaacagctctacagcttcctggagcgccactcgccctacttccgcagccacagtgcgcaaattaggagcgccacttctttttgtcacttgaaaaacatgtaaaaataatgtactaggagacactttcaataaaggcaaatgtttttatttgtacactctcgggtgattatttacccccacccttgccgtctgcgccgtttaaaaatcaaaggggttctgccgcgcatcgctatgcgccactggcagggacacgttgcgatactggtgtttagtgctccacttaaactcaggcacaaccatccgcggcagctcggtgaagttttcactccacaggctgcgcaccatcaccaacgcgtttagcaggtcgggcgccgatatcttgaagtcgcagttggggcctccgccctgcgcgcgcgagttgcgatacacagggttacagcactggaacactatcagcgccgggtggtgcacgctggccagcacgctcttgtcggagatcanatccgcgtccaggtcctccgcgttgctcagggcgaacggagtcaactttggtagctgccttcccaaaaagggtgcatgcccaggctttgagttgcactcgcaccgtagtggcatcagaaggtgaccgtgcccagtctgggcgttaggatacagcgcctgcatgaaagccttgatctgcttaaaagccacctgagcctttgcgccttcagagaagaacatgccgcaagacttgccggaaaactgattggccggacaggccgcgtcatgcacgcagcaccttgcgtcggtgttggagatctgcaccacatttcggccccaccggttcttcacgatcttggccttgctagactgctccttcagcgcgcgctgcccgttttcgctcgtcacatccatttcaatcacgtgctccttatttatcataatgctcccgtgtagacacttaagctcgccttcgatctcagcgcagcggtgcagccacaacgcgcagcccgtgggctcgtggtgcttgtaggttacctctgcaaacgactgcaggtacgcctgcaggaatcgccccatcatcgtcacaaaggtcttgttgctggtgaaggtcagctgcaacccgcggtgctcctcgtttagccaggtcttgcatacggccgccagagcttccacttggtcaggcagtagcttgaagtttgcctttagatcgttatccacgtggtacttgtccatcaacgcgcgcgcagcctccatgcccttctcccacgcagacacgatcggcaggctcagcgggtttatcaccgtgctttcactttccgcttcactggactcttccttttcctcttgcatccgcataccccgcgccactgggtcgtcttcattcagccgccgcaccgtgcgcttacctcccttgccgtgcttgattagcaccggtgggttgctgaaacccaccatttgtagcgccacatcttctctttcttcctcgctgtccacgatcacctctggggatggcgggcgctcgggcttgggagaggggcgcttctttttctttttggacgcaatggccaaatccgccgtcgaggtcgatggccgcgggctgggtgtgcgcggcaccagcgcatcttgtgacgagtcttcttcgtcctcggactcgagacgccgcctcagccgcttttttgggggcgcgcggggaggcggcggcgacggcgacggggacgagacgtcctccatggttggtggacgtcgcgccgcaccgcgtccgcgctcgggggtggtttcgcgctgctcctcttcccgactggccatttccttctcctataggcagaaaaagatcatggagtcagtcgagaaggaggacagcctaaccgccccctttgagttcgccaccaccgcctccaccgatgccgccaacgcgcctaccaccttccccgtcgaggcacccccgcttgaggaggaggaagtgattatcgagcaggacccaggttttgtaagcgaagacgacgaagatcgctcagtaccaacagaggataaaaagcaagaccaggacgacgcagaggcaaacgaggaacaagtcgggcggggggaccaaaggcatggcgactacctagatgtgggagacgacgtgctgttgaagcatctgcagcgccagtgcgccattatctgcgacgcgttgcaagagcgcagcgatgtgcccctcgccatagcggatgtcagccttgcctacgaacgccacctgttctcaccgcgcgtaccccccaaacgccaagaaaacggcacatgcgagcccaacccgcgcctcaacttctaccccgtatttgccgtgccagaggtgcttgccacctatcacatctttttccaaaactgcaagatacccctatcctgccgtgccaaccgcagccgagcggacaagcagctggccttgcggcagggcgctgtcatacctgatatcgcctcgctcgacgaagtgccaaaaatctttgagggtcttggacgcgacgagaagcgcgcggcaaacgctctgcaacaagaaaacagcgaaaatgaaagtcactgtggagtgctggtggaacttgagggtgacaacgcgcgcctagccgtgctgaaacgcagcatcgaggtcacccactttgcctacccggcacttaacctaccccccaaggttatgagcacagtcatgagcgagctgatcgtgcgccgtgcacgacccctggagagggatgcaaacttgcaagaacaaaccgaggagggcctacccgcagttggcgatgagcagctggcgcgctggcttgagacgcgcgagcctgccgacttggaggagcgacgcaagctaatgatggccgcagtgcttgttaccgtggagcttgagtgcatgcagcggttctttgctgacccggagatgcagcgcaagctagaggaaacgttgcactacacctttcgccagggctacgtgcgccaggcctgcaaaatttccaacgtggagctctgcaacctggtctcctaccttggaattttgcacgaaaaccgccttgggcaaaacgtgcttcattccacgctcaagggcgaggcgcgccgcgactacgtccgcgactgcgtttacttatttctgtgctacacctggcaaacggccatgggcgtgtggcagcagtgcctggaggagcgcaacctgaaggagctgcagaagctgctaaagcaaaacttgaaggacctatggacggccttcaacgagcgctccgtggccgcgcacctggcggacattatcttccccgaacgcctgcttaaaaccctgcaacagggtctgccagacttcaccagtcaaagcatgttgcaaaactttaggaactttatcctagagcgttcaggaattctgcccgccacctgctgtgcgcttcctagcgactttgtgcccattaagtaccgtgaatgccctccgccgctttggggtcactgctaccttntgcagctagccaactaccttgcctaccactccgacatcatggaagacgtgagcggtgacggcctactggagtgtcactgtcgctgcaacctatgcaccccgcaccgctccctggtctgcaattcacaactgcttagcgaaagtcaaattatcggtacctttgagctgcagggtccctcgcctgacgaaaagtccgcggctccggggttgaaactcactccggggctgtggacgtcggcttaccttcgcaaatttgtacctgaggactaccacgcccacgagattaggttctacgaagaccaatcccgcccgccaaatgcggagcttaccgcctgcgtcattacccagggccacatccttggccaattgcaagccattaacaaagcccgccaagagtttctgctacgaaagggacggggggtttacttggacccccagtccggcgaggagctcaacccaatccccccgccgccgcagccctatcagcagccgcgggcccttgcttcccaggatggcacccaaaaagaagctgcagctgccgccgccgccacccacggacgaggaggaatactgggacagtcaggcagaggaggttttggacgaggaggaggagatgatggaagactgggacagcctagacgaggaagcttccgaggccgaagaggtgtcagacgaaacaccgtcaccctcggtcgcattcccctcgccggcgccccagaaatcggcaaccgttcccagcattgctacaacctccgctcctcaggcgccgccggcactgcccgttcgccgacccaaccgtagatgggacaccactggaaccagggccggtaagtctaagcagccgccgccgttagcccaagagcaacaacagcgccaaggctaccgctcgtggcgcgtgcacaagaacgccatagttgcttgcttgcaagactgtgggggcaacatctccttcgcccgccgctttcttctctaccatcacggcgtggccttcccccgtaacatcctgcattactaccgtcatctctacagcccctactgcaccggcggcagcggcagcaacagcagcggccacgcagaagcaaaggcgaccggatagcaagactctgacaaagcccaagaaatccacagcggcggcagcagcaggaggaggagcactgcgtctggcgcccaacgaacccgtatcgacccgcgagcttagaaacaggatttttcccactctgtatgctatatttcaacagagcaggggccaagaacaagagctgaaaataaaaaacaggtctctgcgctccctcacccgcagctgcctgtatcacaaaagcgaagatcagcttcggcgcacgctggaagacgcggaggctctcttcagcaaatactgcgcgctgactcttaaggactagtttcgcgccctttctcaaatttaagcgcgaaaactacgtcatctccagcggccacacccggcgccagcacctgtcgtcagcgccattatgagcaaggaaattcccacgccctacatgtggagttaccagccacaaatgggacttgcggctggagctgcccaagactactcaacccgaataaactacatgagcgcgggaccccacatgatatcccgggtcaacggaatccgcgcccaccgaaaccgaattctcctcgaacaggcggctattaccaccacacctcgtaataaccttaatccccgtagttggcccgctgccctggtgtaccaggaaagtcccgctcccaccactgtggtacttcccagagacgcccaggccgaagttcagatgactaactcaggggcgcagcttgcgggcggctttcgtcacagggtgcggtcgcccgggcagggtataactcacctgaaaatcagagggcgaggtattcagctcaacgacgagtcggtgagctcctctcttggtctccgtccggacgggacatttcagatcggcggcgctggccgctcttcatttacgccccgtcaggcgatcctaactctgcagacctcgtcctcggagccgcgctccggaggcattggaactctacaatttattgaggagttcgtgccttcggtttacttcaaccccttttctggacctcccggccactacccggaccagtttattcccaactttgacgcggtaaaagactcggcggacggctacgactgacagatctgagctcgcggccgcgatatcgctagcgaagttcctattctctagaaagtataggaacttcgatcctctagagtcgacctgcaggcatgcaagcttggcactgcaataaattacttacttaaaatcagtcagcaaatctttgtccagcttattcagcatcacctcctttccctcctcccaactctggtatttcagcagccttttagctgcgaactttctccaaagtctaaatgggatgtcaaattcctcatgttcttgtccctccgcacccactatcttcatattgttgcagatgaaacgcgccagaccgtctgaagacaccttcaaccctgtgtacccatatgacacggaaaccggccctccaactgtgcctttccttacccctccctttgtgtcgccaaatgggttccaagaaagtccccccggagtgctttctttgcgtctttcagaacctttggttacctcacacggcatgcttgcgctaaaaatgggcagcggcctgtccctggatcaggcaggcaaccttacatcaaatacaatcactgtttctcaaccgctaaaaaaaacaaagtccaatataactttggaaacatccgcgccccttacagtcagctcaggcgccctaaccatggccacaacttcgcctttggtggtctctgacaacactcttaccatgcaatcacaagcaccgctaaccgtgcaagactcaaaacttagcattgctaccaaagagccacttacagtgttagatggaaaactggccctgcagacatcagcccccctctctgccactgataacaacgccctcactatcactgcctcacctcctcttactactgcaaatggtagtctggctgttaccatggaaaacccactttacaacaacaatggaaaacttgggctcaaaattggcggtcctttgcaagtggccaccgactcacatgcactaacactaggtactggtcagggggttgcagttcataacaatttgctacatacaaaagttacaggcgcaatagggtttgatacatctggcaacatggaacttaaaactggagatggcctctatgtggatagcgccggtcctaaccaaaaactacatattaatctaaataccacaaaaggccttgcttttgacaacaccgcaataacaattaacgctggaaaagggttggaatttgaaacagactcctcaaacggaaatcccataaaaacaaaaattggatcaggcatacaatataataccaatggagctatggttgcaaaacttggaacaggcctcagttttgacagctccggagccataacaatgggcagcataaacaatgacagacttactctttggacaacaccagacccatccccaaattgcagaattgcttcagataaagactgcaagctaactctggcgctaacaaaatgtggcagtcaaattttgggcactgtttcagctttggcagtatcaggtaatatggcctccatcaatggaactctaagcagtgtaaacttggttcttagatttgatgacaacggagtgcttatgtcaaattcatcactggacaaacagtattggaactttagaaacggggactccactaacggtcaaccatacacttatgctgttgggtttatgccaaacctaaaagcttacccaaaaactcaaagtaaaactgcaaaaagtaatattgttagccaggtgtatcttaatggtgacaagtctaaaccattgcattttactattacgctaaatggaacagatgaaaccaaccaagtaagcaaatactcaatatcattcagttggtcctggaacagtggacaatacactaatgacaaatttgccaccaattcctataccttctcctacattgcccaggaataaagaatcgtgaacctgttgcatgttatgtttcaacgtgtttatttttcaattcgtattagtcatcgctattaccatggtgatgcggttttggcagtacatcaatgggcgtggatagcggtttgactcacggggatttccaagtctccaccccattgacgtcaatgggagtttgttttggcaccaaaatcaacgggactttccaaaatgtcgtaacaactccgccccattgacgcaaatgggcggtaggcgtgtacggtgggaggtctatataagcagagctggtttagtgaaccgtcagatccgctagagatccaccatgtttgtctttctcgtgctgctgcccctcgtgagcagccagtgcgtcaatctgacaacaaggacccagctgccccccgcctacaccaactccttcacaagaggcgtgtattaccccgataaggtcttcagatccagcgtcctccacagcacccaagatttgtttctgcctttcttcagcaacgtgacatggttccacgccattcatgtcagcggcacaaacggcacaaagaggtttgacaaccccgtgctccccttcaacgacggcgtgtacttcgccagcacagagaaatccaatatcattaggggctggatcttcggcacaacactggattccaagacccagtctctgctcattgtgaataacgccaccaacgtggtgattaaggtctgtgagtttcagttctgcaacgacccctttctgggagtctactaccacaagaataataagagctggatggagtccgagtttagggtgtacagctccgccaacaactgtaccttcgaatacgtgtcccagcctttcctcatggatctggagggcaagcaaggcaatttcaaaaatctgagagagttcgtgttcaaaaacattgatggatacttcaaaatctacagcaagcatacccccattaatctggtgagggatctgccccaaggattctccgctctggaacctctggtggatctgcccattggcattaacatcacaagattccagaccctcctcgccctccatagatcctatctgacccccggcgactcctccagcggatggacagccggagctgccgcctactacgtgggctatctgcagccaagaacctttctgctgaagtacaacgagaacggcaccatcacagacgctgtcgattgcgctctcgaccctctgagcgagaccaaatgcacactgaagagcttcaccgtggaaaagggcatctatcagaccagcaacttcagagtgcagcctaccgagagcattgtgaggtttcccaacatcaccaatctgtgtcctttcggcgaggtctttaatgccacaaggttcgcttccgtgtatgcttggaataggaagaggatcagcaattgcgtcgccgactattccgtcctctataacagcgcctccttctccaccttcaaatgttatggcgtgtcccccaccaagctcaacgacctctgcttcaccaatgtgtacgctgactccttcgtcattaggggcgacgaggtgaggcaaattgcccccggccagaccggcaagattgctgattacaactacaaactgcccgacgattttaccggctgcgtgatcgcttggaactccaacaatctggactccaaagtgggcggaaactacaattacctctacagactctttagaaaaagcaatctgaagcccttcgagagagacatctccaccgaaatctaccaagccggaagcacaccttgcaatggcgtcgagggatttaactgctacttccctctgcagagctacggctttcaacctaccaacggcgtcggatatcaaccctatagggtggtcgtgctgagctttgaactgctgcatgctcccgccaccgtctgcggacctaagaagagcaccaatctcgtcaaaaacaagtgcgtgaacttcaacttcaatggactgaccggcaccggcgtgctgaccgagagcaataagaagtttctgcccttccagcagttcggaagggatattgccgataccacagatgctgtgagggacccccaaaccctcgagattctggatatcaccccttgcagcttcggaggagtgtccgtgatcacccccggaacaaacacctccaatcaagtggctgtgctgtaccaagacgtgaactgcacagaagtccccgtggccatccatgccgaccagctgacccctacatggagagtgtactccaccggcagcaatgtgttccagacaagagccggatgcctcattggagctgaacacgtcaacaacagctacgagtgcgacattcccatcggcgccggcatttgtgcctcctatcagacccagaccaacagcccaagaagggctagaagcgtcgcttcccaatccatcattgcctacaccatgtctctgggagccgaaaactccgtcgcctactccaacaatagcatcgccatccccaccaattttaccatctccgtgaccacagagattctgcccgtgtccatgacaaagacatccgtggactgcaccatgtacatctgtggcgacagcaccgagtgtagcaatctgctgctgcaatatggcagcttctgcacccagctgaacagagccctcaccggcatcgccgtcgaacaagacaagaacacccaagaggtgttcgcccaagtgaagcaaatctacaagaccccccctatcaaagatttcggaggattcaactttagccagattctgcccgatcctagcaagccttccaagaggagcttcatcgaggatctgctgtttaataaggtgacactggccgacgctggcttcattaaacagtacggcgattgtctgggcgacatcgctgctagggatctgatctgcgctcagaagttcaacggactgacagtcctccctcctctgctgaccgacgagatgatcgctcagtataccagcgctctgctggctggaaccattaccagcggctggacattcggcgctggagccgccctccaaattccctttgccatgcagatggcctatagattcaacggcattggcgtcacccaaaatgtgctgtatgaaaatcagaagctgattgctaaccaattcaatagcgccattggcaagatccaagactctctgagctccacagccagcgccctcggaaagctgcaagacgtggtgaatcaaaacgcccaagctctgaacacactggtgaaacagctcagcagcaactttggagccatcagcagcgtgctcaatgatatcctctctaggctggacaaagtggaggccgaagtccagatcgatagactcatcaccggcagactccaatctctgcagacatacgtcacccaacagctcattagagctgccgaaatcagagcctccgccaatctggccgccaccaagatgtccgagtgcgtgctgggacagagcaagagagtggacttctgtggcaagggataccatctgatgagcttcccccagagcgctccccatggagtggtctttctgcatgtcacatacgtgcccgcccaagagaagaacttcaccaccgctcccgccatttgccacgatggaaaggcccactttcccagagaaggagtgttcgtgagcaacggcacacactggtttgtcacccagagaaatttttacgagccccagattatcaccaccgacaacaccttcgtgtccggaaactgcgatgtcgtgattggcatcgtgaacaacacagtctacgaccctctgcagcccgaactcgacagcttcaaggaagagctggacaagtacttcaagaatcacacatcccccgacgtggatctgggcgacattagcggcattaatgcctccgtcgtcaacattcagaaggagattgatagactgaatgaagtcgccaagaacctcaatgagtctctgattgatctgcaagagctgggcaagtacgagcaatacatcaaatggccttggtacatctggctgggattcatcgctggactcatcgccatcgtgatggtcaccattatgctgtgttgcatgaccagctgctgcagctgtctgaagggctgctgcagctgcggaagctgctgcaagtttgacgaagacgactccgagcccgtgctgaagggcgtcaagctgcattatacataaactagtgctggaattcgcccttatagagtgctggaattcgcccttatagagtgctggaattcgcccttatatctagtaacggccgccagtgtgctggaattcgcccttataacttcgtatagcatacattatacgaagttattgttgacaattaatcatcggcatagtatatcggcatagtataatacgacaaggtgaggaactaaaccatggccaagttgaccagtgccgttccggtgctcaccgcgcgcgacgtcgccggagcggtcgagttctggaccgaccggctcgggttctcccgggacttcgtggaggacgacttcgccggtgtggtccgggacgacgtgaccctgttcatcagcgcggtccaggaccaggtggtgccggacaacaccctggcctgggtgtgggtgcgcggcctggacgagctgtacgccgagtggtcggaggtcgtgtccacgaacttccgggacgcctccgggccggccatgaccgagatcggcgagcagccgtgggggcgggagttcgccctgcgcgacccggccggcaactgcgtgcacttcgtggccgaggagcaggactgaataacttcgtatagcatacattatacgaagttataagggcgaattctgcagatatccatcctttaaaaaacctcccacacctccccctgaacctgaaacataaaatgaatgcaattgttgttgttaacttgtttattgcagcttataatggttacaaataaagcaatagcatcacaaatttcacaaataaagcatttttttcactgcattctagttgtggtttgtccaaactcatcaatgtatcttaacaacgtgtttatttttcaattgcagaaagaattgcagaaaatttcaagtcatttttcattcagtagtatagccccaccaccacatagcttatactaatcaccgtaccttaatcaaactcacagaaccctagtattcaacctgccacctccctcccaacacacagagtacacagtcctttctccccggctggccttaaacagcatcatatcatgggtaacagacatattcttaggtgttatattccacacggtctcctgtcgagccaaacgctcatcagtgatgttaataaactccccgggcagctcgcttaagttcatgtcgctgtccagctgctgagccacaggctgctgtccaacttgcggttgctcaacgggcggcgaaggagaagtccacgcctacatgggggtagagtcataatcgtgcatcaggatagggcggtggtgctgcagcagcgcgcgaataaactgctgccgccgccgctccgtcctgcaggaatacaacatggcagtggtctcctcagcgatgattcgcaccgcccgcagcataaggcgccttgtcctccgggcacagcagcgcaccctgatctcacttaagtcagcacagtaactgcagcacagtaccacaatattgtttaaaatcccacagtgcaaggcgctgtatccaaagctcatggcggggaccacagaacccacgtggccatcataccacaagcgcaggtagattaagtggcgacccctcataaacacgctggacataaacattacctcttttggcatgttgtaattcaccacctcccggtaccatataaacctctgattaaacatggcgccatccaccaccatcctaaaccagctggccaaaacctgcccgccggctatgcactgcagggaaccgggactggaacaatgacagtggagagcccaggactcgtaaccatggatcatcatgctcgtcatgatatcaatgttggcacaacacaggcacacgtgcatacacttcctcaggattacaagctcctcccgcgtcagaaccatatcccagggaacaacccattcctgaatcagcgtaaatcccacactgcagggaagacctcgcacgtaactcacgttgtgcattgtcaaagtgttacattcgggcagcagcggatgatcctccagtatggtagcgcgtgtctctgtctcaaaaggaggtaggcgatccctactgtacggagtgcgccgagacaaccgagatcgtgttggtcgtagtgtcatgccaaatggaacgccggacgtagtcatatttcctgaagcaaaaccaggtgcgggcgtgacaaacagatctgcgtctccggtctcgtcgcttagctcgctctgtgtagtagttgtagtatatccactctctcaaagcatccaggcgccccctggcttcgggttctatgtaaactccttcatgcgccgctgccctgataacatccaccaccgcagaataagccacacccagccaacctacacattcgttctgcgagtcacacacgggaggagcgggaagagctggaagaaccatgttttttttttttattccaaaagattatccaaaacctcaaaatgaagatctattaagtgaacgcgctcccctccggtggcgtggtcaaactctacagccaaagaacagataatggcatttgtaagatgttgcacaatggcttccaaaaggcaaactgccctcacgtccaagtggacgtaaaggctaaacccttcanggtgaatctcctctataaacattccagcaccttcaaccatgcccaaataattttcatctcgccaccttatcaatatgtctctaagcaaatcccgaatattaagtccggccattgtaaaaatctgctccagagcgccctccaccttcagcctcaagcagcgaatcatgattgcaaaaattcaggttcctcacagacctgtataagattcaaaagcggaacattaacaaaaataccgcgatcccgtaggtcccttcgcagggccagctgaacataatcgtgcaggtctgcacggaccagcgcggccacttccccgccaggaaccatgacaaaagaacccacactgattatgacacgcatactcggagctatgctaaccagcgtagccccgatgtaagcttgttgcatgggcggcgatataaaatgcaaggtactgctcaaaaaatcaggcaaagcctcgcgcaaaaaagcaagcacatcgtagtcatgctcatgcagataaaggcaggtaagttccggaaccaccacagaaaaagacaccatttttctctcaaacatgtctgcgggttcctgcataaacacaaaataaaataacaaaaaaaaaaaaacatttaaacattagaagcctgtcttacaacaggaaaaacaacccttataagcataagacggactacggccatgccggcgtgaccgtaaaaaaactggtcaccgtgattaaaaagcaccaccgacagttcctcggtcatgtccggagtcataatgtaagactcggtaaacacatcaggttggttaacatcggtcagtgctaaaaagcgaccgaaatagcccgggggaatacatacccgcaggcgtagagacaacattacagcccccataggaggtataacaaaattaataggagagaaaaacacataaacccctgaaaaaccctcctgcccctaggcaaaatagcaccctcccgctccagaacaacatacagcgcttccacagcggcagccataacagtcagccttaccagtaaaaaaacctattaaaaaacaccactcgacacggcaccagctcaatcagtcacagtgtaaaaagggccaagtacagagcgagtatatataggactaaaaaatgacgtaacggttaaagtccacaaaaaccacccagaaaaccgcacgcgaacctacgcccagaaacgaaagccaaaaaacccacaacttcctcaaatcttcacttccgttttcccacgatacgtcacttcccattttaaaaaaaaactacaattcccaatacatgcaagttactccgccctaaaacctacgtcacccgccccgttcccacgccccgcgccacgtcacaaactccaccccctcattatcatattggcttcaatccaaaataaggtatattattgatgatggcgat

SEQ ID NO: 27 - DNA, 36579 bp, Artificial
  nucleic acid encoding a TcdA/B fusion polypeptide
  misc_feature (7190)..(7190): n is a, c, g, or t
  misc_feature (21091)..(21091): n is a, c, g, or t
  misc_feature (24027)..(24027): n is a, c, g, or t
  misc_feature (35169)..(35169): n is a, c, g, or t
cgccatcatcaataatataccttattttggattgaagccaatatgataatgagggggtggagtttgtgacgtggcgcggggcgtgggaacggggcgggtgacgtagtagtgtggcggaagtgtgatgttgtaagtgtggcggaacacatgtaagcgccggatgtggtaaaagtgacgtttttggtgtgcgccggtgtacacgggaagtgacaattttcgcgcggttttaggcggatgttgtagtaaatttgggcgtaaccaagtaatatttggccattttcgcgggaaaactgaataagaggaagtgaaatctgaataattctgtgttactcatagcgcgtaatatttgtctagggccgcggggactttgaccgtttacgtggagactcgcccaggtgtttttctcaggtgttttccgcgttccgggtcaaagttggcgttttattattatagtcagctgacgcgcagtgtatttatacccggtgagttcctcaagaggccactcttgagtgccagcgagtagagttttctcctccgagccgctccgacaccgggactgaaaatgagacatattatctgccacggaggtgttattaccgaagaaatggccgccagtcttttggaccagctgatcgaagaggtactggctgataatcttccacctcctagccattttgaaccacctacccttcacgaactgtatgatttagacgtgacggcccccgaagatcccaacgaggaggcggtttcgcagatttttcccgagtctgtaatgttggcggtgcaggaagggattgacttattcacttttccgccggcgcccggttctccggagccgcctcacctttcccggcagcccgagcagccggagcagagagccttgggtccggtttctatgccaaaccttgtgccggaggtgatcgatcttacctgccacgaggctggctttccacccagtgacgacgaggatgaagagggtgaggagtttgtgttagattatgtggagcaccccgggcacggttgcaggtcttgtcattatcaccggaggaatacgggggacccagatattatgtgttcgctttgctatatgaggacctgtggcatgtttgtctacagtaagtgaaaaattatgggcagtgggtgatagagtggtgggtttggtgtggtaattttttttttaatttttacagttttgtggtttaaagaattttgtattgtgattttttaaaaggtcctgtgtctgaacctgagcctgagcccgagccagaaccggagcctgcaagacctacccggcgtcctaaattggtgcctgctatcctgagacgcccgacatcacctgtgtctagagaatgcaatagtagtacggatagctgtgactccggtccttctaacacacctcctgagatacacccggtggtcccgctgtgccccattaaaccagttgccgtgagagttggtgggcgtcgccaggctgtggaatgtatcgaggacttgcttaacgagtctgggcaacctttggacttgagctgtaaacgccccaggccataaggtgtaaacctgtgattgcgtgtgtggttaacgcctttgtttgctgaatgagttgatgtaagtttaataaagggtgagataatgtttaacttgcatggcgtgttaaatggggcggggcttaaagggtatataatgcgccgtgggctaatcttggttacatctgacctcatggaggcttgggagtgtttggaagatttttctgctgtgcgtaacttgctggaacagagctctaacagtacctcttggttttggaggtttctgtggggctcctcccaggcaaagttagtctgcagaattaaggaggattacaagtgggaatttgaagagcttttgaaatcctgtggtgagctgtttgattctttgaatctgggtcaccaggcgcttttccaagagaaggtcatcaagactttggatttttccacaccggggcgcgctgcggctgctgttgcttttttgagttttataaaggataaatggagcgaagaaacccatctgagcggggggtacctgctggattttctggccatgcatctgtggagagcggtggtgagacacaagaatcgcctgctactgttgtcttccgtccgcccggcaataataccgacggaggagcaacagcaggaggaagccaggcggcggcggcggcaggagcagagcccatggaacccgagagccggcctggaccctcgggaatgaatgttgtacaggtggctgaactgtttccagaactgagacgcattttaaccattaacgaggatgggcaggggctaaagggggtaaagagggagcggggggcttctgaggctacagaggaggctaggaatctaacttttagcttaatgaccagacaccgtcctgagtgtgttacttttcagcagattaaggataattgcgctaatgagcttgatctgctggcgcagaagtattccataaagcagctgaccacttactggctgcagccaggggatgattttgaggaggctattagggtatatgcaaaggtggcacttaggccagattgcaagtacaagattagcaaacttgtaaatatcaggaattgttgctacatttctgggaacggggccgaggtggagatagatacggaggatagggtggcctttagatgtagcatgataaatatgtggccgggggtgcttggcatggacggggtggttattatgaatgtgaggtttactggtcccaattttagcggtacggttttcctggccaataccaatcttatcctacacggtgtaagcttctatgggtttaacaatacctgtgtggaagcctggaccgatgtaagggttcggggctgtgccttttactgctgctggaagggggtggtgtgtcgccccaaaagcagggcttcaattaagaaatgcctgtttgaaaggtgtaccttgggtatcctgtctgagggtaactccagggtgcgccacaatgtggcctccgactgtggttgctttatgctagtgaaaagcgtggctgtgattaagcataacatggtgtgtggcaactgcgaggacagggcctctcagatgctgacctgctcggacggcaactgtcacttgctgaagaccattcacgtagccagccactctcgcaaggcctggccagtgtttgagcacaacatactgacccgctgttccttgcatttgggtaacaggaggggggtgttcctaccttaccaatgcaatttgagtcacactaagatattgcttgagcccgagagcatgtccaaggtgaacctgaacggggtgtttgacatgaccatgaagatctggaaggtgctgaggtacgatgagacccgcaccaggtgcagaccctgcgagtgtggcggtaaacatattaggaaccagcctgtgatgctggatgtgaccgaggagctgaggcccgatcacttggtgctggcctgcacccgcgctgagtttggctctagcgatgaagatacagattgaggtactgaaatgtgtgggcgtggcttaagggtgggaaagaatatataaggtgggggtctcatgtagttttgtatctgttttgcagcagccgccgccatgagcgccaactcgtttgatggaagcattgtgagctcatatttgacaacgcgcatgcccccatgggccggggtgcgtcagaatgtgatgggctccagcattgatggtcgccccgtcctgcccgcaaactctactaccttgacctacgagaccgtgtctggaacgccgttggagactgcagcctccgccgccgcttcagccgctgcagccaccgcccgcgggattgtgactgactttgctttcctgagcccgcttgcaagcagtgcagcttcccgttcatccgcccgcgatgacaagttgacggctcttttggcacaattggattctttgacccgggaacttaatgtcgtttctcagcagctgttggatctgcgccagcaggtttctgccctgaaggcttcctcccctcccaatgcggtttaaaacataaataaaaaccagactctgtttggatttggatcaagcaagtgtcttgctgtctttatttaggggttttgcgcgcgcggtaggcccgggaccagcggtctcggtcgttgagggtcctgtgtattttttccaggacgtggtaaaggtgactctggatgttcagatacatgggcataagcccgtctctggggtggaggtagcaccactgcagagcttcatgctgcggggtggtgttgtagatgatccagtcgtagcaggagcgctgggcgtggtgcctaaaaatgtctttcagtagcaagctgattgccaggggcaggcccttggtgtaagtgtttacaaagcggttaagctgggatgggtgcatacgtggggatatgagatgcatcttggactgtatttttaggttggctatgttcccagccatatccctccggggattcatgttgtgcagaaccaccagcacagtgtatccggtgcacttgggaaatttgtcatgtagcttagaaggaaatgcgtggaagaacttggagacgcccttgtgacctccaagattttccatgcattcgtccataatgatggcaatgggcccacgggcggcggcctgggcgaagatatttctgggatcactaacgtcatagttgtgttccaggatgagatcgtcataggccatttttacaaagcgcgggcggagggtgccagactgcggtataatggttccatccggcccaggggcgtagttaccctcacagatttgcatttcccacgctttgagttcagatggggggatcatgtctacctgcggggcgatgaagaaaaccgtttccggggtaggggagatcagctgggaagaaagcaggttcctaagcagctgcgacttaccgcagccggtgggcccgtaaatcacacctattaccggctgcaactggtagttaagagagctgcagctgccgtcatccctgagcaggggggccacttcgttaagcatgtccctgacttgcatgttttccctgaccaaatccgccagaaggcgctcgccgcccagcgatagcagttcttgcaaggaagcaaagtttttcaacggtttgaggccgtccgccgtaggcatgcttttgagcgtttgaccaagcagttccaggcggtcccacagctcggtcacgtgctctacggcatctcgatccagcatatctcctcgtttcgcgggttggggcggctttcgctgtacggcagtagtcggtgctcgtccagacgggccagggtcatgtctttccacgggcgcagggtcctcgtcagcgtagtctgggtcacggtgaaggggtgcgctccgggttgcgcgctggccagggtgcgcttgaggctggtcctgctggtgctgaagcgctgccggtcttcgccctgcgcgtcggccaggtagcatttgaccatggtgtcatagtccagcccctccgcggcgtggcccttggcgcgcagcttgcccttggaggaggcgccgcacgaggggcagtgcagacttttaagggcgtagagcttgggcgcgagaaataccgattccggggagtaggcatccgcgccgcaggccccgcagacggtctcgcattccacgagccaggtgagctctggccgttcggggtcaaaaaccaggtttcccccatgctttttgatgcgtttcttacctctggtttccatgagccggtgtccacgctcggtgacgaaaaggctgtccgtgtccccgtatacagacttgagaggcctgtcctcgagcggtgttccgcggtcctcctcgtatagaaactcggaccactctgagacgaaggctcgcgtccaggccagcacgaaggaggctaagtgggaggggtagcggtcgttgtccactagggggtccactcgctccagggtgtgaagacacatgtcgccctcttcggcatcaaggaaggtgattggtttataggtgtaggccacgtgaccgggtgttcctgaaggggggctataaaagggggtgggggcgcgttcgtcctcactctcttccgcatcgctgtctgcgagggccagctgttggggtgagtactccctctcaaaagcgggcatgacttctgcgctaagattgtcagtttccaaaaacgaggaggatttgatattcacctggcccgcggtgatgcctttgagggtggccgcgtccatctggtcagaaaagacaatctttttgttgtcaagcttggtggcaaacgacccgtagagggcgttggacagcaacttggcgatggagcgcagggtttggtttttgtcgcgatcggcgcgctccttggccgcgatgtttagctgcacgtattcgcgcgcaacgcaccgccattcgggaaagacggtggtgcgctcgtcgggcactaggtgcacgcgccaaccgcggttgtgcagggtgacaaggtcaacgctggtggctacctctccgcgtaggcgctcgttggtccagcagaggcggccgcccttgcgcgagcagaatggcggtagtgggtctagctgcgtctcgtccggggggtctgcgtccacggtaaagaccccgggcagcaggcgcgcgtcgaagtagtctatcttgcatccttgcaagtctagcgcctgctgccatgcgcgggcggcaagcgcgcgctcgtatgggttgagtgggggaccccatggcatggggtgggtgagcgcggaggcgtacatgccgcaaatgtcgtaaacgtagaggggctctctgagtattccaagatatgtagggtagcatcttccaccgcggatgctggcgcgcacgtaatcgtatagttcgtgcgagggagcgaggaggtcgggaccgaggttgctacgggcgggctgctctgctcggaagactatctgcctgaagatggcatgtgagttggatgatatggttggacgctggaagacgttgaagctggcgtctgtgagacctaccgcgtcacgcacgaaggaggcgtaggagtcgcgcagcttgttgaccagctcggcggtgacctgcacgtctagggcgcagtagtccagggtttccttgatgatgtcatacttatcctgtcccttttttttccacagctcgcggttgaggacaaactcttcgcggtctttccagtactcttggatcggaaacccgtcggcctccgaacggtaagagcctancatgtagaactggttgacggcctggtaggcgcagcatcccttttctacgggtagcgcgtatgcctgcgcggccttccggagcgaggtgtgggtgagcgcaaaggtgtccctaaccatgactttgaggtactggtatttgaagtcagtgtcgtcgcatccgccctgctcccagagcaaaaagtccgtgcgctttttggaacgcgggtttggcagggcgaaggtgacatcgttgaagagtatctttcccgcgcgaggcataaagttgcgtgtgatgcggaagggtcccggcacctcggaacggttgttaattacctgggcggcgagcacgatctcgtcaaagccgttgatgttgtggcccacaatgtaaagttccaagaagcgcgggatgcccttgatggaaggcaattttttaagttcctcgtaggtgagctcttcaggggagctgagcccgtgctctgaaagggcccagtctgcaagatgagggttggaagcgacgaatgagctccacaggtcacgggccattagcatttgcaggtggtcgcgaaaggtcctaaactggcgacctatggccattttttctggggtgatgcagtagaaggtaagcgggtcttgttcccagcggtcccatccaaggtccgcggctaggtctcgcgcggcggtcactagaggctcatctccgccgaacttcatgaccagcatgaagggcacgagctgcttcccaaaggcccccatccaagtataggtctctacatcgtaggtgacaaagagacgctcggtgcgaggatgcgagccgatcgggaagaactggatctcccgccaccagttggaggagtggctgttgatgtggtgaaagtagaagtccctgcgacgggccgaacactcgtgctggcttttgtaaaaacgtgcgcagtactggcagcggtgcacgggctgtacatcctgcacgaggttgacctgacgaccgcgcacaaggaagcagagtgggaatttgagcccctcgcctggcgggtttggctggtggtcttctacttcggctgcttgtccttgaccgtctggctgctcgaggggagttacggtggatcggaccaccacgccgcgcgagcccaaagtccagatgtccgcgcgcggcggtcggagcttgatgacaacatcgcgcagatgggagctgtccatggtctggagctcccgcggcgtcaggtcaggcgggagctcctgcaggtttacctcgcatagccgggtcagggcgcgggctaggtccaggtgatacctgatttccaggggctggttggtggcggcgtcgatggcttgcaagaggccgcatccccgcggcgcgactacggtaccgcgcggcgggcggtgggccgcgggggtgtccttggatgatgcatctaaaagcggtgacgcgggcgggcccccggaggtagggggggctcgggacccgccgggagagggggcaggggcacgtcggcgccgcgcgcgggcaggagctggtgctgcgcgcggaggttgctggcgaacgcgacgacgcggcggttgatctcctgaatctggcgcctctgcgtgaagacgacgggcccggtgagcttgaacctgaaagagagttcgacagaatcaatttcggtgtcgttgacggcggcctggcgcaaaatctcctgcacgtctcctgagttgtcttgataggcgatctcggccatgaactgctcgatctcttcctcctggagatctccgcgtccggctcgctccacggtggcggcgaggtcgttggagatgcgggccatgagctgcgagaaggcgttgaggcctccctcgttccagacgcggctgtagaccacgcccccttcggcatcgcgggcgcgcatgaccacctgcgcgagattgagctccacgtgccgggcgaagacggcgtagtttcgcaggcgctgaaagaggtagttgagggtggtggcggtgtgttctgccacgaagaagtacataacccagcgccgcaacgtggattcgttgatatcccccaaggcctcaaggcgctccatggcctcgtagaagtccacggcgaagttgaaaaactgggagttgcgcgccgacacggttaactcctcctccagaagacggatgagctcggcgacagtgtcgcgcacctcgcgctcaaaggctacaggggcctcttcttcttcttcaatctcctcttccataagggcctccccttcttcttcttctggcggcggtgggggaggggggacacggcggcgacgacggcgcaccgggaggcggtcgacaaagcgctcgatcatctccccgcggcgacggcgcatggtctcggtgacggcgcggccgttctcgcgggggcgcagttggaagacgccgcccgtcatgtcccggttatgggttggcggggggctgccgtgcggcagggatacggcgctaacgatgcatctcaacaattgttgtgtaggtactccgccaccgagggacctgagcgagtccgcatcgaccggatcggaaaacctctcgagaaaggcgtctaaccagtcacagtcgcaaggtaggctgagcaccgtggcgggcggcagcgggcggcggtcggggttgtttctggcggaggtgctgctgatgatgtaattaaagtaggcggtcttgagacggcggatggtcgacagaagcaccatgtccttgggtccggcctgctgaatgcgcaggcggtcggccatgccccaggcttcgttttgacatcggcgcaggtctttgtagtagtcttgcatgagcctttctaccggcacttcttcttctccttcctcttgtcctgcatctcttgcatctatcgctgcggcggcggcggagtttggccgtaggtggcgccctcttcctcccatgcgtgtgaccccgaagcccctcatcggctgaagcagggccaggtcggcgacaacgcgctcggctaatatggcctgctgcacctgcgtgagggtagactggaagtcgtccatgtccacaaagcggtggtatgcgcccgtgttgatggtgtaagtgcagttggccataacggaccagttaacggtctggtgacccggctgcgagagctcggtgtacctgagacgcgagtaagcccttgagtcaaagacgtagtcgttgcaagtccgcaccaggtactggtatcccaccaaaaagtgcggcggcggctggcggtagaggggccagcgtagggtggccggggctccgggggcgaggtcttccaacataaggcgatgatatccgtagatgtacctggacatccaggtgatgccggcggcggtggtggaggcgcgcggaaagtcacggacgcggttccagatgttgcgcagcggcaaaaagtgctccatggtcgggacgctctggccggtcaggcgcgcgcagtcgttgacgctctagaccgtgcaaaaggagagcctgtaagcgggcactcttccgtggtctggtggataaattcgcaagggtatcatggcggacgaccggggttcgaaccccggatccggccgtccgccgtgatccatgcggttaccgcccgcgtgtcgaacccaggtgtgcgacgtcagacaacgggggagcgctccttttggcttccttccaggcgcggcggatgctgcgctagcttttttggccactggccgcgcgcggcgtaagcggttaggctggaaagcgaaagcattaagtggctcgctccctgtagccggagggttattttccaagggttgagtcgcgggacccccggttcgagtctcgggccggccggactgcggcgaacgggggtttgcctccccgtcatgcaagaccccgcttgcaaattcctccggaaacagggacgagccccttttttgcttttcccagatgcatccggtgctgcggcagatgcgcccccctcctcagcagcggcaagagcaagagcagcggcagacatgcagggcaccctcccctcctcctaccgcgtcaggaggggcgacatccgcggttgacgcggcagcagatggtgattacgaacccccgcggcgccgggcccggcactacctggacttggaggagggcgagggcctggcgcggctaggagcgccctctcctgagcggtacccaagggtgcagctgaagcgtgatacgcgtgaggcgtacgtgccgcggcagaacctgtttcgcgaccgcgagggagaggagcccgaggagatgcgggatcgaaagttccacgcagggcgcgagctgcggcatggcctgaatcgcgagcggttgctgcgcgaggaggactttgagcccgacgcgcgaaccgggattagtcccgcgcgcgcacacgtggcggccgccgacctggtaaccgcatacgagcagacggtgaaccaggagattaactttcaaaaaagctttaacaaccacgtgcgtacgcttgtggcgcgcgaggaggtggctataggactgatgcatctgtgggactttgtaagcgcgctggagcaaaacccaaatagcaagccgctcatggcgcagctgttccttatagtgcagcacagcagggacaacgaggcattcagggatgcgctgctaaacatagtagagcccgagggccgctggctgctcgatttgataaacatcctgcagagcatagtggtgcaggagcgcagcttgagcctggctgacaaggtggccgccatcaactattccatgcttagcctgggcaagttttacgcccgcaagatataccataccccttacgttcccatagacaaggaggtaaagatcgaggggttctacatgcgcatggcgctgaaggtgcttaccttgagcgacgacctgggcgtttatcgcaacgagcgcatccacaaggccgtgagcgtgagccggcggcgcgagctcagcgaccgcgagctgatgcacagcctgcaaagggccctggctggcacgggcagcggcgatagagaggccgagtcctactttgacgcgggcgctgacctgcgctgggccccaagccgacgcgccctggaggcagctggggccggacctgggctggcggtggcacccgcgcgcgctggcaacgtcggcggcgtggaggaatatgacgaggacgatgagtacgagccagaggacggcgagtactaagcggtgatgtttctgatcagtcgcggccgcgatatcgctagcgaagttcctattctctagaaagtataggaacttcggatcctctagagtcgaaaaaaaaaaagcatgatgcaaaataaaaaactcaccaaggccatggcaccgagcgttggttttcttgtattccccttagtatgcggcgcgcggcgatgtatgaggaaggtcctcctccctcctacgagagtgtggtgagcgcggcgccagtggcggcggcgctgggttctcccttcgatgctcccctggacccgccgtttgtgcctccgcggtacctgcggcctaccggggggagaaacagcatccgttactctgagttggcacccctattcgacaccacccgtgtgtacctggtggacaacaagtcaacggatgtggcatccctgaactaccagaacgaccacagcaactttctgaccacggtcattcaaaacaatgactacagcccgggggaggcaagcacacagaccatcaatcttgacgaccggtcgcactggggcggcgacctgaaaaccatcctgcataccaacatgccaaatgtgaacgagttcatgtttaccaataagtttaaggcgcgggtgatggtgtcgcgcttgcctactaaggacaatcaggtggagctgaaatacgagtgggtggagttcacgctgcccgagggcaactactccgagaccatgaccatagaccttatgaacaacgcgatcgtggagcactacttgaaagtgggcagacagaacggggttctggaaagcgacatcggggtaaagtttgacacccgcaacttcagactggggtttgaccccgtcactggtcttgtcatgcctggggtatatacaaacgaagccttccatccagacatcattttgctgccaggatgcggggtggacttcacccacagccgcctgagcaacttgttgggcatccgcaagcggcaacccttccaggagggctttaggatcacctacgatgatctggagggtggtaacattcccgcactgttggatgtggacgcctaccaggcgagcttgaaagatgacaccgaacagggcgggggtggcgcaggcggcagcaacagcagtggcagcggcgcggaagagaactccaacgcggcagccgcggcaatgcagccggtggaggacatgaacgatcatgccattcgcggcgacacctttgccacacgggctgaggagaagcgcgctgaggccgaagcagcggccgaagctgccgcccccgctgcgcaacccgaggtcgagaagcctcagaagaaaccggtgatcaaacccctgacagaggacagcaagaaacgcagttacaacctaataagcaatgacagcaccttcacccagtaccgcagctggtaccttgcatacaactacggcgaccctcagaccggaatccgctcatggaccctgctttgcactcctgacgtaacctgcggctcggagcaggtctactggtcgttgccagacatgatgcaagaccccgtgaccttccgctccacgcgccagatcagcaactttccggtggtgggcgccgagctgttgcccgtgcactccaagagcttctacaacgaccaggccgtctactcccaactcatccgccagtttacctctctgacccacgtgttcaatcgctttcccgagaaccagattttggcgcgcccgccagcccccaccatcaccaccgtcagtgaaaacgttcctgctctcacagatcacgggacgctaccgctgcgcaacagcatcggaggagtccagcgagtgaccattactgacgccagacgccgcacctgcccctacgtttacaaggccctgggcatagtctcgccgcgcgtcctatcgagccgcactttttgagcaagcatgtccatccttatatcgcccagcaataacacaggctggggcctgcgcttcccaagcaagatgtttggcggggccaagaagcgctccgaccaacacccagtgcgcgtgcgcgggcactaccgcgcgccctggggcgcgcacaaacgcggccgcactgggcgcaccaccgtcgatgacgccatcgacgcggtggtggaggaggcgcgcaactacacgcccacgccgccgccagtgtccaccgtggacgcggccattcagaccgtggtgcgcggagcccggcgctacgctaaaatgaagagacggcggaggcgcgtagcacgtcgccaccgccgccgacccggcactgccgcccaacgcgcggcggcggccctgcttaaccgcgcacgtcgcaccggccgacgggcggccatgcgagccgctcgaaggctggccgcgggtattgtcactgtgccccccaggtccaggcgacgagcggccgccgcagcagccgcggccattagtgttatgactcagggtcgcaggggcaacgtgtactgggtgcgcgactcggttagcggcctgcgcgtgcccgtgcgcacccgccccccgcgcaactagattgcaataaaaaactacttagactcgtactgttgtatgtatccagcggcggcggcgcgcatcgaagctatgtccaagcgcaaaatcaaagaagagatgctccaggtcatcgcgccggagatctatggccccccgaagaaggaagagcaggattacaagccccgaaagctaaagcgggtcaaaaagaaaaagaaagatgatgatgatgatgaacttgacgacgaggtggaactgttgcacgcgaccgcgcccaggcgacgggtacagtggaaaggtcgacgcgtaagacgtgttttgcgacccggcaccaccgtagtctttacgcccggtgagcgctccacccgcacctacaagcgcgtgtatgatgaggtgtacggcgacgaggacctgcttgagcaggccaacgagcgcctcggggagtttgcctacggaaagcggcataaggacatgctggcgttgccgctggacgagggcaacccaacacctagcctaaagcccgtgacactgcagcaggtgctgcccgcgcttgcaccgtccgaagaaaagcgcggcctaaagcgcgagtctggtgacttggcacccaccgtgcagctgatggtacccaagcgtcagcgactggaagatgtcttggaaaaaatgaccgtggagcctgggctggagcccgaggtccgcgtgcggccaatcaagcaggtggcaccgggactgggcgtgcagaccgtggacgttcagatacccaccaccagtagcactagtattgccactgccacagagggcatggagacacaaacgtccccggttgcctcggcggtggcagatgccgcggtgcaggcggccgctgcggccgcgtccaagacctctacggaggtgcaaacggacccgtggatgtttcgtgtttcagccccccggcgtccgcgccgttcaaggaagtacggcgccgccagcgcgctactgcccgaatatgccctacatccttccatcgcgcctacccccggctatcgtggctacacctaccgccccagaagacgagcaactacccgacgccgaaccaccactggaacccgccgccgccgtcgccgtcgccagcccgtgctggccccgatttccgtgcgcagggtggctcgcgaaggaggcaggaccctggtgctgccaacagcgcgctaccaccccagcatcgtttaaaagccggtctttgtggttcttgcagatatggccctcacctgccgcctccgtttcccggtgccgggattccgaggaagaatgcaccgtaggaggggcatggccggccacggcctgacgggcggcatgcgtcgtgcgcaccaccggcggcggcgcgcgtcgcaccgtcgcatgcgcgccggtatcctgcccctccttattccactgatcgccgcggcgattggcgccgtgcccggaattgcatccgtggccttgcaggcgcagagacactgattaaaaacaagttacatgtggaaaaatcaaaataaaagtctggactctcacgctcgcttggtcctgtaactattttgtagaatggaagacatcaactttgcgtcactggccccgcgacacggctcgcgcccgttcatgggaaactggcaagatatcggcaccagcaatatgagcggtggcgccttcagctggggctcgctgtggagcggcattaaaaatttcggttccgccgttaagaactatggcagcaaagcctggaacagcagcacaggccagatgctgagggacaagttgaaagagcaaaatttccaacaaaaggtggtagatggcctggcctctggcattagcggggtggtggacctggccaaccaggcagtgcaaaataagattaacagtaagcttgatccccgccctcccgtagaggagcctccaccggccgtggagacagtgtctccagaggggcgtggcgaaaagcgtccgcgacccgacagggaagaaactctggtgacgcaaatagacgagcctccctcgtacgaggaggcactaaagcaaggcctgcccaccacccgtcccatcgcgcccatggctaccggagtgctgggccagcacacacccgtaacgctggacctgcctccccccgccgacacccagcagaaacctgtgctgccaggcccgtccgccgttgttgtaacccgtcctagccgcgggtccctgcgccgcgccgccagcggtccgcgatcgttgcggcccgtagccagtggcaactggcaaagcacactgaacagcatcgtgggtttgggggtgcaatccctgaagcgccgacgatgcttctgatagctaacgtgtcgtatgtgtgtcatgtatgcgtccatgtcgccgccagaggagctgctgagccgccgcgcgcccgctttccaagatggctaccccttcgatgatgccgcagtggtcttacatgcacatctcgggccaggacgcctcggagtacctgagccccgggctggtgcagttcgcccgcgccaccgagacgtacttcagcctgaataacaagtttagaaaccccacggtggcgcctacgcacgacgtgaccacagaccggtctcagcgtttgacgctgcggttcatccccgtggaccgcgaggatactgcgtactcgtacaaggcgcggttcaccctagctgtgggtgataaccgtgtgctagacatggcttccacgtactttgacatccgcggcgtgctggacaggggccctacttttaagccctactctggcactgcctacaacgcactggcccccaagggtgcccccaactcgtgcgagtgggaacaaaatgaaactgcacaagtggatgctcaagaacttgacgaagaggagaatgaagccaatgaagctcaggcgcgagaacaggaacaagctaagaaaacccatgtatatgcccaggctccactgtccggaataaaaataactaaagaaggtctacaaataggaactgccgacgccacagtagcaggtgccggcaaagaaattttcgcagacaaaacttttcaacctgaaccacaagtaggagaatctcaatggaacgaagcggatgccacagcagctggtggaagggttcttaaaaagacaactcccatgaaaccctgctatggctcatacgctagacccaccaattccaacggcggacagggcgttatggttgaacaaaatggtaaattggaaagtcaagtcgaaatgcaatttttttccacatccacaaatgccacaaatgaagttaacaatatacaaccaacagttgtattgtacagcgaagatgtaaacatggaaactccagatactcatctttcttataaacctaaaatgggggataaaaatgccaaagtcatgcttggacaacaagcaatgccaaacagaccaaattacattgcttttagagacaattttattggtctcatgtattacaacagcacaggtaacatgggtgtccttgctggtcaggcatcgcagttgaacgctgttgtagatttgcaagacagaaacacagagctgtcctaccagcttttgcttgattcaattggcgacagaacaagatacttttcaatgtggaatcaagctgttgacagctatgatccagatgtcagaattattgagaaccatggaactgaggatgagttgccaaattattgctttcctcttggtggaattgggattactgacacttttcaagctgttaaaacaactgctgctaacggggaccaaggcaatactacctggcaaaaagattcaacatttgcagaacgcaatgaaataggggtgggaaataactttgccatggaaattaacctgaatgccaacctatggagaaatttcctttactccaatattgcgctgtacctgccagacaagctaaaatacaaccccaccaatgtggaaatatctgacaaccccaacacctacgactacatgaacaagcgagtggtggctcctgggcttgtagactgctacattaaccttggggcgcgctggtctctggactacatggacaacgttaatccctttaaccacccccgccatgcgggcctgcgttaccgctccatgttgttgggaaacggccgctacgtgccctttcacattcaggtgccccaaaagttttttgccattaaaaacctcctcctcctgccaggctcatacacatatgaatggaacttcaggaaggatgttaacatggttctgcagagctctctgggaaacgaccttagagttgacggggctagcattaagtttgacagcatttgtctttacgccaccttcttccccatggcccacaacacggcctccacgctggaagccatgctcagaaatgacaccaacgaccagtcctttaatgactacctttccgccgccaacatgctatatcccatacccgccaacgccaccaacgtgcccatctccatcccatcgcgcaactgggcagcatttcgcggttgggccttcacacgcttgaagacaaaggaaaccccttccctgggatcaggctacgacccttactacacctactctggctccataccataccttgacggaaccttctatcttaatcacacctttaagaaggtggccattacttttgactcttctgttagctggccgggcaacgaccgcctgcttactcccaatgagtttgagattaagcgctcagttgacggggagggctataacgtagctcagtgcaacatgacaaaggactggttcctagtgcagatgttggccaactacaatattggctaccagggcttctacattccagaaagctacaaagaccgcatgtactcgttcttcagaaacttccagcccatgagccggcaagtggtggacgatactaaatacaaagattatcagcaggttggaattatccaccagcataacaactcaggcttcgtaggctacctcgctcccaccatgcgcgagggacaagcttaccccgctaatgttccctacccactaataggcaaaaccgcggttgatagtattacccagaaaaagtttctttgcgaccgcaccctgtggcgcatccccttctccagtaactttatgtccatgggtgcgctcacagacctgggccaaaaccttctctacgcaaactccgcccacgcgctagacatgacctttgaggtggatcccatggacgagcccacccttctttatgttttgtttgaagtctttgacgtggtccgtgtgcaccagccgcaccgcggcgtcatcgagaccgtgtacctgcgcacgcccttctcggccggcaacgccacaacataaagaagcaagcaacatcaacaacagctgccgccatgggctccagtgagcaggaactgaaagccattgtcaaagatcttggttgtgggccatattttttgggcacctatgacaagcgcttcccaggctttgtttccccacacaagctcgcctgcgccatagttaacacggccggtcgcgagactgggggcgtacactggatggcctttgcctggaacccgcgctcaaaaacatgctacctctttgagccctttggcttttctgaccaacgtctcaagcaggtttaccagtttgagtacgagtcactcctgcgccgtagcgccattgcctcttcccccgaccgctgtataacgctggaaaagtccacccaaagcgtgcaggggcccaactcggccgcctgtggcctattctgctgcatgtttctccacgcctttgccaactggccccaaactcccatggatcacaaccccaccatgaaccttattaccggggtacccaactccatgcttaacagtccccaggtacagcccaccctgcgccgcaaccaggaacagctctacagcttcctggagcgccactcgccctacttccgcagccacagtgcgcaaattaggagcgccacttctttttgtcacttgaaaaacatgtaaaaataatgtactaggagacactttcaataaaggcaaatgtttttatttgtacactctcgggtgattatttacccccacccttgccgtctgcgccgtttaaaaatcaaaggggttctgccgcgcatcgctatgcgccactggcagggacacgttgcgatactggtgtttagtgctccacttaaactcaggcacaaccatccgcggcagctcggtgaagttttcactccacaggctgcgcaccatcaccaacgcgtttagcaggtcgggcgccgatatcttgaagtcgcagttggggcctccgccctgcgcgcgcgagttgcgatacacagggttacagcactggaacactatcagcgccgggtggtgcacgctggccagcacgctcttgtcggagatcanatccgcgtccaggtcctccgcgttgctcagggcgaacggagtcaactttggtagctgccttcccaaaaagggtgcatgcccaggctttgagttgcactcgcaccgtagtggcatcagaaggtgaccgtgcccagtctgggcgttaggatacagcgcctgcatgaaagccttgatctgcttaaaagccacctgagcctttgcgccttcagagaagaacatgccgcaagacttgccggaaaactgattggccggacaggccgcgtcatgcacgcagcaccttgcgtcggtgttggagatctgcaccacatttcggccccaccggttcttcacgatcttggccttgctagactgctccttcagcgcgcgctgcccgttttcgctcgtcacatccatttcaatcacgtgctccttatttatcataatgctcccgtgtagacacttaagctcgccttcgatctcagcgcagcggtgcagccacaacgcgcagcccgtgggctcgtggtgcttgtaggttacctctgcaaacgactgcaggtacgcctgcaggaatcgccccatcatcgtcacaaaggtcttgttgctggtgaaggtcagctgcaacccgcggtgctcctcgtttagccaggtcttgcatacggccgccagagcttccacttggtcaggcagtagcttgaagtttgcctttagatcgttatccacgtggtacttgtccatcaacgcgcgcgcagcctccatgcccttctcccacgcagacacgatcggcaggctcagcgggtttatcaccgtgctttcactttccgcttcactggactcttccttttcctcttgcatccgcataccccgcgccactgggtcgtcttcattcagccgccgcaccgtgcgcttacctcccttgccgtgcttgattagcaccggtgggttgctgaaacccaccatttgtagcgccacatcttctctttcttcctcgctgtccacgatcacctctggggatggcgggcgctcgggcttgggagaggggcgcttctttttctttttggacgcaatggccaaatccgccgtcgaggtcgatggccgcgggctgggtgtgcgcggcaccagcgcatcttgtgacgagtcttcttcgtcctcggactcgagacgccgcctcagccgcttttttgggggcgcgcggggaggcggcggcgacggcgacggggacgagacgtcctccatggttggtggacgtcgcgccgcaccgcgtccgcgctcgggggtggtttcgcgctgctcctcttcccgactggccatttccttctcctataggcagaaaaagatcatggagtcagtcgagaaggaggacagcctaaccgccccctttgagttcgccaccaccgcctccaccgatgccgccaacgcgcctaccaccttccccgtcgaggcacccccgcttgaggaggaggaagtgattatcgagcaggacccaggttttgtaagcgaagacgacgaagatcgctcagtaccaacagaggataaaaagcaagaccaggacgacgcagaggcaaacgaggaacaagtcgggcggggggaccaaaggcatggcgactacctagatgtgggagacgacgtgctgttgaagcatctgcagcgccagtgcgccattatctgcgacgcgttgcaagagcgcagcgatgtgcccctcgccatagcggatgtcagccttgcctacgaacgccacctgttctcaccgcgcgtaccccccaaacgccaagaaaacggcacatgcgagcccaacccgcgcctcaacttctaccccgtatttgccgtgccagaggtgcttgccacctatcacatctttttccaaaactgcaagatacccctatcctgccgtgccaaccgcagccgagcggacaagcagctggccttgcggcagggcgctgtcatacctgatatcgcctcgctcgacgaagtgccaaaaatctttgagggtcttggacgcgacgagaagcgcgcggcaaacgctctgcaacaagaaaacagcgaaaatgaaagtcactgtggagtgctggtggaacttgagggtgacaacgcgcgcctagccgtgctgaaacgcagcatcgaggtcacccactttgcctacccggcacttaacctaccccccaaggttatgagcacagtcatgagcgagctgatcgtgcgccgtgcacgacccctggagagggatgcaaacttgcaagaacaaaccgaggagggcctacccgcagttggcgatgagcagctggcgcgctggcttgagacgcgcgagcctgccgacttggaggagcgacgcaagctaatgatggccgcagtgcttgttaccgtggagcttgagtgcatgcagcggttctttgctgacccggagatgcagcgcaagctagaggaaacgttgcactacacctttcgccagggctacgtgcgccaggcctgcaaaatttccaacgtggagctctgcaacctggtctcctaccttggaattttgcacgaaaaccgccttgggcaaaacgtgcttcattccacgctcaagggcgaggcgcgccgcgactacgtccgcgactgcgtttacttatttctgtgctacacctggcaaacggccatgggcgtgtggcagcagtgcctggaggagcgcaacctgaaggagctgcagaagctgctaaagcaaaacttgaaggacctatggacggccttcaacgagcgctccgtggccgcgcacctggcggacattatcttccccgaacgcctgcttaaaaccctgcaacagggtctgccagacttcaccagtcaaagcatgttgcaaaactttaggaactttatcctagagcgttcaggaattctgcccgccacctgctgtgcgcttcctagcgactttgtgcccattaagtaccgtgaatgccctccgccgctttggggtcactgctaccttntgcagctagccaactaccttgcctaccactccgacatcatggaagacgtgagcggtgacggcctactggagtgtcactgtcgctgcaacctatgcaccccgcaccgctccctggtctgcaattcacaactgcttagcgaaagtcaaattatcggtacctttgagctgcagggtccctcgcctgacgaaaagtccgcggctccggggttgaaactcactccggggctgtggacgtcggcttaccttcgcaaatttgtacctgaggactaccacgcccacgagattaggttctacgaagaccaatcccgcccgccaaatgcggagcttaccgcctgcgtcattacccagggccacatccttggccaattgcaagccattaacaaagcccgccaagagtttctgctacgaaagggacggggggtttacttggacccccagtccggcgaggagctcaacccaatccccccgccgccgcagccctatcagcagccgcgggcccttgcttcccaggatggcacccaaaaagaagctgcagctgccgccgccgccacccacggacgaggaggaatactgggacagtcaggcagaggaggttttggacgaggaggaggagatgatggaagactgggacagcctagacgaggaagcttccgaggccgaagaggtgtcagacgaaacaccgtcaccctcggtcgcattcccctcgccggcgccccagaaatcggcaaccgttcccagcattgctacaacctccgctcctcaggcgccgccggcactgcccgttcgccgacccaaccgtagatgggacaccactggaaccagggccggtaagtctaagcagccgccgccgttagcccaagagcaacaacagcgccaaggctaccgctcgtggcgcgtgcacaagaacgccatagttgcttgcttgcaagactgtgggggcaacatctccttcgcccgccgctttcttctctaccatcacggcgtggccttcccccgtaacatcctgcattactaccgtcatctctacagcccctactgcaccggcggcagcggcagcaacagcagcggccacgcagaagcaaaggcgaccggatagcaagactctgacaaagcccaagaaatccacagcggcggcagcagcaggaggaggagcactgcgtctggcgcccaacgaacccgtatcgacccgcgagcttagaaacaggatttttcccactctgtatgctatatttcaacagagcaggggccaagaacaagagctgaaaataaaaaacaggtctctgcgctccctcacccgcagctgcctgtatcacaaaagcgaagatcagcttcggcgcacgctggaagacgcggaggctctcttcagcaaatactgcgcgctgactcttaaggactagtttcgcgccctttctcaaatttaagcgcgaaaactacgtcatctccagcggccacacccggcgccagcacctgtcgtcagcgccattatgagcaaggaaattcccacgccctacatgtggagttaccagccacaaatgggacttgcggctggagctgcccaagactactcaacccgaataaactacatgagcgcgggaccccacatgatatcccgggtcaacggaatccgcgcccaccgaaaccgaattctcctcgaacaggcggctattaccaccacacctcgtaataaccttaatccccgtagttggcccgctgccctggtgtaccaggaaagtcccgctcccaccactgtggtacttcccagagacgcccaggccgaagttcagatgactaactcaggggcgcagcttgcgggcggctttcgtcacagggtgcggtcgcccgggcagggtataactcacctgaaaatcagagggcgaggtattcagctcaacgacgagtcggtgagctcctctcttggtctccgtccggacgggacatttcagatcggcggcgctggccgctcttcatttacgccccgtcaggcgatcctaactctgcagacctcgtcctcggagccgcgctccggaggcattggaactctacaatttattgaggagttcgtgccttcggtttacttcaaccccttttctggacctcccggccactacccggaccagtttattcccaactttgacgcggtaaaagactcggcggacggctacgactgacagatctgagctcgcggccgcgatatcgctagcgaagttcctattctctagaaagtataggaacttcgatcctctagagtcgacctgcaggcatgcaagcttggcactgcaataaattacttacttaaaatcagtcagcaaatctttgtccagcttattcagcatcacctcctttccctcctcccaactctggtatttcagcagccttttagctgcgaactttctccaaagtctaaatgggatgtcaaattcctcatgttcttgtccctccgcacccactatcttcatattgttgcagatgaaacgcgccagaccgtctgaagacaccttcaaccctgtgtacccatatgacacggaaaccggccctccaactgtgcctttccttacccctccctttgtgtcgccaaatgggttccaagaaagtccccccggagtgctttctttgcgtctttcagaacctttggttacctcacacggcatgcttgcgctaaaaatgggcagcggcctgtccctggatcaggcaggcaaccttacatcaaatacaatcactgtttctcaaccgctaaaaaaaacaaagtccaatataactttggaaacatccgcgccccttacagtcagctcaggcgccctaaccatggccacaacttcgcctttggtggtctctgacaacactcttaccatgcaatcacaagcaccgctaaccgtgcaagactcaaaacttagcattgctaccaaagagccacttacagtgttagatggaaaactggccctgcagacatcagcccccctctctgccactgataacaacgccctcactatcactgcctcacctcctcttactactgcaaatggtagtctggctgttaccatggaaaacccactttacaacaacaatggaaaacttgggctcaaaattggcggtcctttgcaagtggccaccgactcacatgcactaacactaggtactggtcagggggttgcagttcataacaatttgctacatacaaaagttacaggcgcaatagggtttgatacatctggcaacatggaacttaaaactggagatggcctctatgtggatagcgccggtcctaaccaaaaactacatattaatctaaataccacaaaaggccttgcttttgacaacaccgcaataacaattaacgctggaaaagggttggaatttgaaacagactcctcaaacggaaatcccataaaaacaaaaattggatcaggcatacaatataataccaatggagctatggttgcaaaacttggaacaggcctcagttttgacagctccggagccataacaatgggcagcataaacaatgacagacttactctttggacaacaccagacccatccccaaattgcagaattgcttcagataaagactgcaagctaactctggcgctaacaaaatgtggcagtcaaattttgggcactgtttcagctttggcagtatcaggtaatatggcctccatcaatggaactctaagcagtgtaaacttggttcttagatttgatgacaacggagtgcttatgtcaaattcatcactggacaaacagtattggaactttagaaacggggactccactaacggtcaaccatacacttatgctgttgggtttatgccaaacctaaaagcttacccaaaaactcaaagtaaaactgcaaaaagtaatattgttagccaggtgtatcttaatggtgacaagtctaaaccattgcattttactattacgctaaatggaacagatgaaaccaaccaagtaagcaaatactcaatatcattcagttggtcctggaacagtggacaatacactaatgacaaatttgccaccaattcctataccttctcctacattgcccaggaataaagaatcgtgaacctgttgcatgttatgtttcaacgtgtttatttttcaattcgtattagtcatcgctattaccatggtgatgcggttttggcagtacatcaatgggcgtggatagcggtttgactcacggggatttccaagtctccaccccattgacgtcaatgggagtttgttttggcaccaaaatcaacgggactttccaaaatgtcgtaacaactccgccccattgacgcaaatgggcggtaggcgtgtacggtgggaggtctatataagcagagctggtttagtgaaccgtcagatccgctagagatctaaccggtggaaagcgctaccatgccttcatccgtgtcatggggaatcctgctgctggctggactgtgctgtctggtgcctgtctcactggccgaggacccttttaatctggtgacaggctggcagactatcaatgggaagaaatactatttcgacattaacaccggcgccgctctgatcagctacaagatcattaacgggaaacacttctacttcaacaatgacggagtgatgcagctgggcgtctttaagggccccgatgggttcgagtacttcgcacctgccaatacacagaacaataacattgaaggacaggccatcgtgtatcagtccaaattcctgactctgaacggcaagaaatactattttgaccaggattctaaggccgtcaccgggtggcgaatcattaataacgagaagtactacttcaaccccaataacgctattgcagccgtgggcctgcaggtcatcgacaataacaagtactatttcaaccctgatactgccatcatttccaaaggatggcagaccgtgcagggctctcgctactatttcgacaccgatacagccatcgccttcaacgggtacaagaccatcgacggaaaacatttctattttgactcagattgcgtggtcaagatcggcgtgttcagcacctccaacggcttcgagtactttgccccagctaacacatacaacaacaacatcgagggccaggccatcgtgtaccagagcaagttcctgaccctgaatggcaagaaatactacttcgaccagaactctaaggcagtcaccgggtggcagacaatcgatagtaagaagtactacttcaacactaacaccgccgaggctgcaactggctggcagaccatcgacgggaagaaatattatttcaatacaaacactgccgaagccgctacaggatggcagactattgacggcaagaaatattacttcaacaccaacacagcaatcgcctctacagggtacactatcattaatggaaagcacttctacttcaacactgatgggatcatgcagattggagtgttcaaaggaccaaatggcttcgagtactttgctcccgcaaacacagacgccaacaatattgagggccaggctatcctgtatcagaatgaattcctgacactgaacggcaagaaatattattttgggtctgatagtaaggctgtgactggctggaggatcattaacaataagaagtactatttcaaccccaacaacgcaatcgcagccattcacctgtgcaccattaacaatgacaagtactacttcagctacgacggcatcctgcagaatgggtatatcacaattgagcgcaacaatttctactttgacgccaaccaggaatccaagatggtgaccggcgtcttcaaagggcctaatggatttgaatatttcgccccagctaacacacataataacaatatcgaggggcaggctatcgtgtatcagaataagttcctgaccctgaacggcaagaaatactactttgaccaggatagcaaagccgtgaccggatggcagacaatcgatggcaagaaatattatttcaatctgaacacagccgaggccgcaactgggtggcagaccatcgatggaaagaaatactacttcaacctgaacactgctgaagccgctaccggatggcagactatcgacgggaagaaatactatttcaatactaacacctttattgcctctaccggatacacaagtatcaatggcaagcacttctacttcaacacggatggaatcatgcagattggcgtgttcaaaggccccaacggatttgaatactttgcacctgccaacactcataataacaatattgaaggccaggctatcctgtaccaaaataagttcctgaccctgaacgggaagaaatattacttcggatcagacagcaaagccgtgaccggcctgaggacaatcgatgggaagaaatattatttcaatacgaacactgctgtggcagtcactggatggcagaccattaatggcaagaaatattacttcaacacgcagacaagcatcgcctccactgggtacaccatcattagcggaaagcacttctacttcaacaccgacggcattatgcagatcggagtgttcaaaggccctgatggatttgagtactttgcccccgctaatacagatgcaaataacattgaaggccaggccatccgataccagaaccggttcctgtatctgcatgacaatatctactattttggccagaactccaaggcagccacaggctgggtgactatcgatgggaatcggtactatttcgagcctaatacagctatgggggcaaacggatacaagactatcgataacaagaacttctacttccggaatggcctgcctcagatcggggtgtttaagggcagcaacggattcgagtactttgcaccagccaacaccgacgccaataatattgaaggccaggcaatcagataccagaacaggttcctgcatctgctgggcaaaatctactacttcggccagaattccaaagcagtgactggctggcagacaatcaacggaaaggtctactacttcatgcctgacacagcaatggctgcagccggcggactgttcgagattgacggcgtgatctacttctttggagtggatggcgtcaaagcacctggaatctacggaagaggacggagatcaagaggaaggcgcagcaacctgatcactggattcgtgaccgtcggcgacgataagtactacttcaaccctattaacggaggcgctgcatccatcggcgagaccatcatcgacgataagaactactacttccagcagagtggggtgctgcagacaggagtcttctcaactgaggacggcttcaagtactttgctccagcaaataccctggatgaaaacctggagggagaagccattgactttacaggcaagctgatcatcgatgaaaacatctactacttcgacgataactaccgcggagctgtggagtggaaagaactggacggcgagatgcactatttctctccagaaaccggcaaggccttcaaggggctgaatcagatcggagactacaagtactatttcaacagcgatggcgtgatgcagaaggggtttgtctccatcaatgacaacaaacactacttcgacgatagcggagtgatgaaggtcggctacaccgagattgatggcaaacatttctattttgctgagaatggggaaatgcaaatcggagtgttcaacacagaagatggcttcaagtactttgcccaccataatgaggacctgggcaacgaggaaggggaggaaatttcctactctggcatcctgaacttcaacaacaaaatctactatttcgacgatagcttcaccgcagtggtgggatggaaggacctggaggatggaagcaaatactattttgacgaggataccgccgaagcttacattggcctgtccctgatcaatgacgggcagtactacttcaacgacgatggcattatgcaagtggggttcgtcaccatcaacgacaaggtgttctactttagtgattcaggaatcattgagtctggcgtccagaatattgacgataactacttctatatcgacgataatgggatcgtgcagattggagtcttcgacaccagcgatgggtacaagtattttgcacccgccaacaccgtgaatgacaacatctacggccaggccgtcgagtattcaggcctggtgcgggtcggggaagacgtgtactatttcggcgagacttacaccattgaaacagggtggatctatgacatggagcaagaaagtgataagtactatttcaatcctgagactaagaaagcctgcaaaggcatcaacctgattgacgatatcaagtactacttcgatgagaagggaatcatgagaaccggcctgatcagcttcgaaaacaataactactacttcaacgagaacggggaaatgcagttcggatacatcaacatcgaggacaagatgttctacttcggggaagatggagtgatgcagatcggagtctttaacacacccgacggcttcaaatactttgcccaccagaatactctggatgagaacttcgagggggaatctatccagtacaccggatggctggacctggatgagaagaggtactatttcaccgacgagtacatcgccgctacaggcagtgtgattatcgacggcgaggagtattacttcgatcccgacaccgctcagctggtcatctcagagtaataaactagtaacggccgccagtgtgctggaattcgcccttataacttcgtatagcatacattatacgaagttattgttgacaattaatcatcggcatagtatatcggcatagtataatacgacaaggtgaggaactaaaccatggccaagttgaccagtgccgttccggtgctcaccgcgcgcgacgtcgccggagcggtcgagttctggaccgaccggctcgggttctcccgggacttcgtggaggacgacttcgccggtgtggtccgggacgacgtgaccctgttcatcagcgcggtccaggaccaggtggtgccggacaacaccctggcctgggtgtgggtgcgcggcctggacgagctgtacgccgagtggtcggaggtcgtgtccacgaacttccgggacgcctccgggccggccatgaccgagatcggcgagcagccgtgggggcgggagttcgccctgcgcgacccggccggcaactgcgtgcacttcgtggccgaggagcaggactgaataacttcgtatagcatacattatacgaagttataagggcgaattctgcagatatccatcctttaaaaaacctcccacacctccccctgaacctgaaacataaaatgaatgcaattgttgttgttaacttgtttattgcagcttataatggttacaaataaagcaatagcatcacaaatttcacaaataaagcatttttttcactgcattctagttgtggtttgtccaaactcatcaatgtatcttaacaacgtgtttatttttcaattgcagaaagaattgcagaaaatttcaagtcatttttcattcagtagtatagccccaccaccacatagcttatactaatcaccgtaccttaatcaaactcacagaaccctagtattcaacctgccacctccctcccaacacacagagtacacagtcctttctccccggctggccttaaacagcatcatatcatgggtaacagacatattcttaggtgttatattccacacggtctcctgtcgagccaaacgctcatcagtgatgttaataaactccccgggcagctcgcttaagttcatgtcgctgtccagctgctgagccacaggctgctgtccaacttgcggttgctcaacgggcggcgaaggagaagtccacgcctacatgggggtagagtcataatcgtgcatcaggatagggcggtggtgctgcagcagcgcgcgaataaactgctgccgccgccgctccgtcctgcaggaatacaacatggcagtggtctcctcagcgatgattcgcaccgcccgcagcataaggcgccttgtcctccgggcacagcagcgcaccctgatctcacttaagtcagcacagtaactgcagcacagtaccacaatattgtttaaaatcccacagtgcaaggcgctgtatccaaagctcatggcggggaccacagaacccacgtggccatcataccacaagcgcaggtagattaagtggcgacccctcataaacacgctggacataaacattacctcttttggcatgttgtaattcaccacctcccggtaccatataaacctctgattaaacatggcgccatccaccaccatcctaaaccagctggccaaaacctgcccgccggctatgcactgcagggaaccgggactggaacaatgacagtggagagcccaggactcgtaaccatggatcatcatgctcgtcatgatatcaatgttggcacaacacaggcacacgtgcatacacttcctcaggattacaagctcctcccgcgtcagaaccatatcccagggaacaacccattcctgaatcagcgtaaatcccacactgcagggaagacctcgcacgtaactcacgttgtgcattgtcaaagtgttacattcgggcagcagcggatgatcctccagtatggtagcgcgtgtctctgtctcaaaaggaggtaggcgatccctactgtacggagtgcgccgagacaaccgagatcgtgttggtcgtagtgtcatgccaaatggaacgccggacgtagtcatatttcctgaagcaaaaccaggtgcgggcgtgacaaacagatctgcgtctccggtctcgtcgcttagctcgctctgtgtagtagttgtagtatatccactctctcaaagcatccaggcgccccctggcttcgggttctatgtaaactccttcatgcgccgctgccctgataacatccaccaccgcagaataagccacacccagccaacctacacattcgttctgcgagtcacacacgggaggagcgggaagagctggaagaaccatgttttttttttttattccaaaagattatccaaaacctcaaaatgaagatctattaagtgaacgcgctcccctccggtggcgtggtcaaactctacagccaaagaacagataatggcatttgtaagatgttgcacaatggcttccaaaaggcaaactgccctcacgtccaagtggacgtaaaggctaaacccttcanggtgaatctcctctataaacattccagcaccttcaaccatgcccaaataattttcatctcgccaccttatcaatatgtctctaagcaaatcccgaatattaagtccggccattgtaaaaatctgctccagagcgccctccaccttcagcctcaagcagcgaatcatgattgcaaaaattcaggttcctcacagacctgtataagattcaaaagcggaacattaacaaaaataccgcgatcccgtaggtcccttcgcagggccagctgaacataatcgtgcaggtctgcacggaccagcgcggccacttccccgccaggaaccatgacaaaagaacccacactgattatgacacgcatactcggagctatgctaaccagcgtagccccgatgtaagcttgttgcatgggcggcgatataaaatgcaaggtactgctcaaaaaatcaggcaaagcctcgcgcaaaaaagcaagcacatcgtagtcatgctcatgcagataaaggcaggtaagttccggaaccaccacagaaaaagacaccatttttctctcaaacatgtctgcgggttcctgcataaacacaaaataaaataacaaaaaaaaaaaaacatttaaacattagaagcctgtcttacaacaggaaaaacaacccttataagcataagacggactacggccatgccggcgtgaccgtaaaaaaactggtcaccgtgattaaaaagcaccaccgacagttcctcggtcatgtccggagtcataatgtaagactcggtaaacacatcaggttggttaacatcggtcagtgctaaaaagcgaccgaaatagcccgggggaatacatacccgcaggcgtagagacaacattacagcccccataggaggtataacaaaattaataggagagaaaaacacataaacccctgaaaaaccctcctgcccctaggcaaaatagcaccctcccgctccagaacaacatacagcgcttccacagcggcagccataacagtcagccttaccagtaaaaaaacctattaaaaaacaccactcgacacggcaccagctcaatcagtcacagtgtaaaaagggccaagtacagagcgagtatatataggactaaaaaatgacgtaacggttaaagtccacaaaaaccacccagaaaaccgcacgcgaacctacgcccagaaacgaaagccaaaaaacccacaacttcctcaaatcttcacttccgttttcccacgatacgtcacttcccattttaaaaaaaaactacaattcccaatacatgcaagttactccgccctaaaacctacgtcacccgccccgttcccacgccccgcgccacgtcacaaactccaccccctcattatcatattggcttcaatccaaaataaggtatattattgatgatggcgat

SEQ ID NO: 28 - DNA, 36201 bp, Artificial; identical to SEQ ID NO: 26
  nucleic acid sequence of SC-Ad6-(delta)III-(delta)E3-CMV-Spike-3X-LZL
  misc_feature (7190)..(7190): n is a, c, g, or t
  misc_feature (21091)..(21091): n is a, c, g, or t
  misc_feature (24027)..(24027): n is a, c, g, or t
  misc_feature (34791)..(34791): n is a, c, g, or t

SEQ ID NO: 29 - DNA, 36201 bp, Artificial
  nucleic acid sequence of SC-Ad6-(delta)III-(delta)E3-CMV-Spike-PP-3X-LZL
  misc_feature (7190)..(7190): n is a, c, g, or t
  misc_feature (21091)..(21091): n is a, c, g, or t
  misc_feature (24027)..(24027): n is a, c, g, or t
  misc_feature (34791)..(34791): n is a, c, g, or t
cgccatcatcaataatataccttattttggattgaagccaatatgataatgagggggtggagtttgtgacgtggcgcggggcgtgggaacggggcgggtgacgtagtagtgtggcggaagtgtgatgttgtaagtgtggcggaacacatgtaagcgccggatgtggtaaaagtgacgtttttggtgtgcgccggtgtacacgggaagtgacaattttcgcgcggttttaggcggatgttgtagtaaatttgggcgtaaccaagtaatatttggccattttcgcgggaaaactgaataagaggaagtgaaatctgaataattctgtgttactcatagcgcgtaatatttgtctagggccgcggggactttgaccgtttacgtggagactcgcccaggtgtttttctcaggtgttttccgcgttccgggtcaaagttggcgttttattattatagtcagctgacgcgcagtgtatttatacccggtgagttcctcaagaggccactcttgagtgccagcgagtagagttttctcctccgagccgctccgacaccgggactgaaaatgagacatattatctgccacggaggtgttattaccgaagaaatggccgccagtcttttggaccagctgatcgaagaggtactggctgataatcttccacctcctagccattttgaaccacctacccttcacgaactgtatgatttagacgtgacggcccccgaagatcccaacgaggaggcggtttcgcagatttttcccgagtctgtaatgttggcggtgcaggaagggattgacttattcacttttccgccggcgcccggttctccggagccgcctcacctttcccggcagcccgagcagccggagcagagagccttgggtccggtttctatgccaaaccttgtgccggaggtgatcgatcttacctgccacgaggctggctttccacccagtgacgacgaggatgaagagggtgaggagtttgtgttagattatgtggagcaccccgggcacggttgcaggtcttgtcattatcaccggaggaatacgggggacccagatattatgtgttcgctttgctatatgaggacctgtggcatgtttgtctacagtaagtgaaaaattatgggcagtgggtgatagagtggtgggtttggtgtggtaattttttttttaatttttacagttttgtggtttaaagaattttgtattgtgattttttaaaaggtcctgtgtctgaacctgagcctgagcccgagccagaaccggagcctgcaagacctacccggcgtcctaaattggtgcctgctatcctgagacgcccgacatcacctgtgtctagagaatgcaatagtagtacggatagctgtgactccggtccttctaacacacctcctgagatacacccggtggtcccgctgtgccccattaaaccagttgccgtgagagttggtgggcgtcgccaggctgtggaatgtatcgaggacttgcttaacgagtctgggcaacctttggacttgagctgtaaacgccccaggccataaggtgtaaacctgtgattgcgtgtgtggttaacgcctttgtttgctgaatgagttgatgtaagtttaataaagggtgagataatgtttaacttgcatggcgtgttaaatggggcggggcttaaagggtatataatgcgccgtgggctaatcttggttacatctgacctcatggaggcttgggagtgtttggaagatttttctgctgtgcgtaacttgctggaacagagctctaacagtacctcttggttttggaggtttctgtggggctcctcccaggcaaagttagtctgcagaattaaggaggattacaagtgggaatttgaagagcttttgaaatcctgtggtgagctgtttgattctttgaatctgggtcaccaggcgcttttccaagagaaggtcatcaagactttggatttttccacaccggggcgcgctgcggctgctgttgcttttttgagttttataaaggataaatggagcgaagaaacccatctgagcggggggtacctgctggattttctggccatgcatctgtggagagcggtggtgagacacaagaatcgcctgctactgttgtcttccgtccgcccggcaataataccgacggaggagcaacagcaggaggaagccaggcggcggcggcggcaggagcagagcccatggaacccgagagccggcctggaccctcgggaatgaatgttgtacaggtggctgaactgtttccagaactgagacgcattttaaccattaacgaggatgggcaggggctaaagggggtaaagagggagcggggggcttctgaggctacagaggaggctaggaatctaacttttagcttaatgaccagacaccgtcctgagtgtgttacttttcagcagattaaggataattgcgctaatgagcttgatctgctggcgcagaagtattccataaagcagctgaccacttactggctgcagccaggggatgattttgaggaggctattagggtatatgcaaaggtggcacttaggccagattgcaagtacaagattagcaaacttgtaaatatcaggaattgttgctacatttctgggaacggggccgaggtggagatagatacggaggatagggtggcctttagatgtagcatgataaatatgtggccgggggtgcttggcatggacggggtggttattatgaatgtgaggtttactggtcccaattttagcggtacggttttcctggccaataccaatcttatcctacacggtgtaagcttctatgggtttaacaatacctgtgtggaagcctggaccgatgtaagggttcggggctgtgccttttactgctgctggaagggggtggtgtgtcgccccaaaagcagggcttcaattaagaaatgcctgtttgaaaggtgtaccttgggtatcctgtctgagggtaactccagggtgcgccacaatgtggcctccgactgtggttgctttatgctagtgaaaagcgtggctgtgattaagcataacatggtgtgtggcaactgcgaggacagggcctctcagatgctgacctgctcggacggcaactgtcacttgctgaagaccattcacgtagccagccactctcgcaaggcctggccagtgtttgagcacaacatactgacccgctgttccttgcatttgggtaacaggaggggggtgttcctaccttaccaatgcaatttgagtcacactaagatattgcttgagcccgagagcatgtccaaggtgaacctgaacggggtgtttgacatgaccatgaagatctggaaggtgctgaggtacgatgagacccgcaccaggtgcagaccctgcgagtgtggcggtaaacatattaggaaccagcctgtgatgctggatgtgaccgaggagctgaggcccgatcacttggtgctggcctgcacccgcgctgagtttggctctagcgatgaagatacagattgaggtactgaaatgtgtgggcgtggcttaagggtgggaaagaatatataaggtgggggtctcatgtagttttgtatctgttttgcagcagccgccgccatgagcgccaactcgtttgatggaagcattgtgagctcatatttgacaacgcgcatgcccccatgggccggggtgcgtcagaatgtgatgggctccagcattgatggtcgccccgtcctgcccgcaaactctactaccttgacctacgagaccgtgtctggaacgccgttggagactgcagcctccgccgccgcttcagccgctgcagccaccgcccgcgggattgtgactgactttgctttcctgagcccgcttgcaagcagtgcagcttcccgttcatccgcccgcgatgacaagttgacggctcttttggcacaattggattctttgacccgggaacttaatgtcgtttctcagcagctgttggatctgcgccagcaggtttctgccctgaaggcttcctcccctcccaatgcggtttaaaacataaataaaaaccagactctgtttggatttggatcaagcaagtgtcttgctgtctttatttaggggttttgcgcgcgcggtaggcccgggaccagcggtctcggtcgttgagggtcctgtgtattttttccaggacgtggtaaaggtgactctggatgttcagatacatgggcataagcccgtctctggggtggaggtagcaccactgcagagcttcatgctgcggggtggtgttgtagatgatccagtcgtagcaggagcgctgggcgtggtgcctaaaaatgtctttcagtagcaagctgattgccaggggcaggcccttggtgtaagtgtttacaaagcggttaagctgggatgggtgcatacgtggggatatgagatgcatcttggactgtatttttaggttggctatgttcccagccatatccctccggggattcatgttgtgcagaaccaccagcacagtgtatccggtgcacttgggaaatttgtcatgtagcttagaaggaaatgcgtggaagaacttggagacgcccttgtgacctccaagattttccatgcattcgtccataatgatggcaatgggcccacgggcggcggcctgggcgaagatatttctgggatcactaacgtcatagttgtgttccaggatgagatcgtcataggccatttttacaaagcgcgggcggagggtgccagactgcggtataatggttccatccggcccaggggcgtagttaccctcacagatttgcatttcccacgctttgagttcagatggggggatcatgtctacctgcggggcgatgaagaaaaccgtttccggggtaggggagatcagctgggaagaaagcaggttcctaagcagctgcgacttaccgcagccggtgggcccgtaaatcacacctattaccggctgcaactggtagttaagagagctgcagctgccgtcatccctgagcaggggggccacttcgttaagcatgtccctgacttgcatgttttccctgaccaaatccgccagaaggcgctcgccgcccagcgatagcagttcttgcaaggaagcaaagtttttcaacggtttgaggccgtccgccgtaggcatgcttttgagcgtttgaccaagcagttccaggcggtcccacagctcggtcacgtgctctacggcatctcgatccagcatatctcctcgtttcgcgggttggggcggctttcgctgtacggcagtagtcggtgctcgtccagacgggccagggtcatgtctttccacgggcgcagggtcctcgtcagcgtagtctgggtcacggtgaaggggtgcgctccgggttgcgcgctggccagggtgcgcttgaggctggtcctgctggtgctgaagcgctgccggtcttcgccctgcgcgtcggccaggtagcatttgaccatggtgtcatagtccagcccctccgcggcgtggcccttggcgcgcagcttgcccttggaggaggcgccgcacgaggggcagtgcagacttttaagggcgtagagcttgggcgcgagaaataccgattccggggagtaggcatccgcgccgcaggccccgcagacggtctcgcattccacgagccaggtgagctctggccgttcggggtcaaaaaccaggtttcccccatgctttttgatgcgtttcttacctctggtttccatgagccggtgtccacgctcggtgacgaaaaggctgtccgtgtccccgtatacagacttgagaggcctgtcctcgagcggtgttccgcggtcctcctcgtatagaaactcggaccactctgagacgaaggctcgcgtccaggccagcacgaaggaggctaagtgggaggggtagcggtcgttgtccactagggggtccactcgctccagggtgtgaagacacatgtcgccctcttcggcatcaaggaaggtgattggtttataggtgtaggccacgtgaccgggtgttcctgaaggggggctataaaagggggtgggggcgcgttcgtcctcactctcttccgcatcgctgtctgcgagggccagctgttggggtgagtactccctctcaaaagcgggcatgacttctgcgctaagattgtcagtttccaaaaacgaggaggatttgatattcacctggcccgcggtgatgcctttgagggtggccgcgtccatctggtcagaaaagacaatctttttgttgtcaagcttggtggcaaacgacccgtagagggcgttggacagcaacttggcgatggagcgcagggtttggtttttgtcgcgatcggcgcgctccttggccgcgatgtttagctgcacgtattcgcgcgcaacgcaccgccattcgggaaagacggtggtgcgctcgtcgggcactaggtgcacgcgccaaccgcggttgtgcagggtgacaaggtcaacgctggtggctacctctccgcgtaggcgctcgttggtccagcagaggcggccgcccttgcgcgagcagaatggcggtagtgggtctagctgcgtctcgtccggggggtctgcgtccacggtaaagaccccgggcagcaggcgcgcgtcgaagtagtctatcttgcatccttgcaagtctagcgcctgctgccatgcgcgggcggcaagcgcgcgctcgtatgggttgagtgggggaccccatggcatggggtgggtgagcgcggaggcgtacatgccgcaaatgtcgtaaacgtagaggggctctctgagtattccaagatatgtagggtagcatcttccaccgcggatgctggcgcgcacgtaatcgtatagttcgtgcgagggagcgaggaggtcgggaccgaggttgctacgggcgggctgctctgctcggaagactatctgcctgaagatggcatgtgagttggatgatatggttggacgctggaagacgttgaagctggcgtctgtgagacctaccgcgtcacgcacgaaggaggcgtaggagtcgcgcagcttgttgaccagctcggcggtgacctgcacgtctagggcgcagtagtccagggtttccttgatgatgtcatacttatcctgtcccttttttttccacagctcgcggttgaggacaaactcttcgcggtctttccagtactcttggatcggaaacccgtcggcctccgaacggtaagagcctancatgtagaactggttgacggcctggtaggcgcagcatcccttttctacgggtagcgcgtatgcctgcgcggccttccggagcgaggtgtgggtgagcgcaaaggtgtccctaaccatgactttgaggtactggtatttgaagtcagtgtcgtcgcatccgccctgctcccagagcaaaaagtccgtgcgctttttggaacgcgggtttggcagggcgaaggtgacatcgttgaagagtatctttcccgcgcgaggcataaagttgcgtgtgatgcggaagggtcccggcacctcggaacggttgttaattacctgggcggcgagcacgatctcgtcaaagccgttgatgttgtggcccacaatgtaaagttccaagaagcgcgggatgcccttgatggaaggcaattttttaagttcctcgtaggtgagctcttcaggggagctgagcccgtgctctgaaagggcccagtctgcaagatgagggttggaagcgacgaatgagctccacaggtcacgggccattagcatttgcaggtggtcgcgaaaggtcctaaactggcgacctatggccattttttctggggtgatgcagtagaaggtaagcgggtcttgttcccagcggtcccatccaaggtccgcggctaggtctcgcgcggcggtcactagaggctcatctccgccgaacttcatgaccagcatgaagggcacgagctgcttcccaaaggcccccatccaagtataggtctctacatcgtaggtgacaaagagacgctcggtgcgaggatgcgagccgatcgggaagaactggatctcccgccaccagttggaggagtggctgttgatgtggtgaaagtagaagtccctgcgacgggccgaacactcgtgctggcttttgtaaaaacgtgcgcagtactggcagcggtgcacgggctgtacatcctgcacgaggttgacctgacgaccgcgcacaaggaagcagagtgggaatttgagcccctcgcctggcgggtttggctggtggtcttctacttcggctgcttgtccttgaccgtctggctgctcgaggggagttacggtggatcggaccaccacgccgcgcgagcccaaagtccagatgtccgcgcgcggcggtcggagcttgatgacaacatcgcgcagatgggagctgtccatggtctggagctcccgcggcgtcaggtcaggcgggagctcctgcaggtttacctcgcatagccgggtcagggcgcgggctaggtccaggtgatacctgatttccaggggctggttggtggcggcgtcgatggcttgcaagaggccgcatccccgcggcgcgactacggtaccgcgcggcgggcggtgggccgcgggggtgtccttggatgatgcatctaaaagcggtgacgcgggcgggcccccggaggtagggggggctcgggacccgccgggagagggggcaggggcacgtcggcgccgcgcgcgggcaggagctggtgctgcgcgcggaggttgctggcgaacgcgacgacgcggcggttgatctcctgaatctggcgcctctgcgtgaagacgacgggcccggtgagcttgaacctgaaagagagttcgacagaatcaatttcggtgtcgttgacggcggcctggcgcaaaatctcctgcacgtctcctgagttgtcttgataggcgatctcggccatgaactgctcgatctcttcctcctggagatctccgcgtccggctcgctccacggtggcggcgaggtcgttggagatgcgggccatgagctgcgagaaggcgttgaggcctccctcgttccagacgcggctgtagaccacgcccccttcggcatcgcgggcgcgcatgaccacctgcgcgagattgagctccacgtgccgggcgaagacggcgtagtttcgcaggcgctgaaagaggtagttgagggtggtggcggtgtgttctgccacgaagaagtacataacccagcgccgcaacgtggattcgttgatatcccccaaggcctcaaggcgctccatggcctcgtagaagtccacggcgaagttgaaaaactgggagttgcgcgccgacacggttaactcctcctccagaagacggatgagctcggcgacagtgtcgcgcacctcgcgctcaaaggctacaggggcctcttcttcttcttcaatctcctcttccataagggcctccccttcttcttcttctggcggcggtgggggaggggggacacggcggcgacgacggcgcaccgggaggcggtcgacaaagcgctcgatcatctccccgcggcgacggcgcatggtctcggtgacggcgcggccgttctcgcgggggcgcagttggaagacgccgcccgtcatgtcccggttatgggttggcggggggctgccgtgcggcagggatacggcgctaacgatgcatctcaacaattgttgtgtaggtactccgccaccgagggacctgagcgagtccgcatcgaccggatcggaaaacctctcgagaaaggcgtctaaccagtcacagtcgcaaggtaggctgagcaccgtggcgggcggcagcgggcggcggtcggggttgtttctggcggaggtgctgctgatgatgtaattaaagtaggcggtcttgagacggcggatggtcgacagaagcaccatgtccttgggtccggcctgctgaatgcgcaggcggtcggccatgccccaggcttcgttttgacatcggcgcaggtctttgtagtagtcttgcatgagcctttctaccggcacttcttcttctccttcctcttgtcctgcatctcttgcatctatcgctgcggcggcggcggagtttggccgtaggtggcgccctcttcctcccatgcgtgtgaccccgaagcccctcatcggctgaagcagggccaggtcggcgacaacgcgctcggctaatatggcctgctgcacctgcgtgagggtagactggaagtcgtccatgtccacaaagcggtggtatgcgcccgtgttgatggtgtaagtgcagttggccataacggaccagttaacggtctggtgacccggctgcgagagctcggtgtacctgagacgcgagtaagcccttgagtcaaagacgtagtcgttgcaagtccgcaccaggtactggtatcccaccaaaaagtgcggcggcggctggcggtagaggggccagcgtagggtggccggggctccgggggcgaggtcttccaacataaggcgatgatatccgtagatgtacctggacatccaggtgatgccggcggcggtggtggaggcgcgcggaaagtcacggacgcggttccagatgttgcgcagcggcaaaaagtgctccatggtcgggacgctctggccggtcaggcgcgcgcagtcgttgacgctctagaccgtgcaaaaggagagcctgtaagcgggcactcttccgtggtctggtggataaattcgcaagggtatcatggcggacgaccggggttcgaaccccggatccggccgtccgccgtgatccatgcggttaccgcccgcgtgtcgaacccaggtgtgcgacgtcagacaacgggggagcgctccttttggcttccttccaggcgcggcggatgctgcgctagcttttttggccactggccgcgcgcggcgtaagcggttaggctggaaagcgaaagcattaagtggctcgctccctgtagccggagggttattttccaagggttgagtcgcgggacccccggttcgagtctcgggccggccggactgcggcgaacgggggtttgcctccccgtcatgcaagaccccgcttgcaaattcctccggaaacagggacgagccccttttttgcttttcccagatgcatccggtgctgcggcagatgcgcccccctcctcagcagcggcaagagcaagagcagcggcagacatgcagggcaccctcccctcctcctaccgcgtcaggaggggcgacatccgcggttgacgcggcagcagatggtgattacgaacccccgcggcgccgggcccggcactacctggacttggaggagggcgagggcctggcgcggctaggagcgccctctcctgagcggtacccaagggtgcagctgaagcgtgatacgcgtgaggcgtacgtgccgcggcagaacctgtttcgcgaccgcgagggagaggagcccgaggagatgcgggatcgaaagttccacgcagggcgcgagctgcggcatggcctgaatcgcgagcggttgctgcgcgaggaggactttgagcccgacgcgcgaaccgggattagtcccgcgcgcgcacacgtggcggccgccgacctggtaaccgcatacgagcagacggtgaaccaggagattaactttcaaaaaagctttaacaaccacgtgcgtacgcttgtggcgcgcgaggaggtggctataggactgatgcatctgtgggactttgtaagcgcgctggagcaaaacccaaatagcaagccgctcatggcgcagctgttccttatagtgcagcacagcagggacaacgaggcattcagggatgcgctgctaaacatagtagagcccgagggccgctggctgctcgatttgataaacatcctgcagagcatagtggtgcaggagcgcagcttgagcctggctgacaaggtggccgccatcaactattccatgcttagcctgggcaagttttacgcccgcaagatataccataccccttacgttcccatagacaaggaggtaaagatcgaggggttctacatgcgcatggcgctgaaggtgcttaccttgagcgacgacctgggcgtttatcgcaacgagcgcatccacaaggccgtgagcgtgagccggcggcgcgagctcagcgaccgcgagctgatgcacagcctgcaaagggccctggctggcacgggcagcggcgatagagaggccgagtcctactttgacgcgggcgctgacctgcgctgggccccaagccgacgcgccctggaggcagctggggccggacctgggctggcggtggcacccgcgcgcgctggcaacgtcggcggcgtggaggaatatgacgaggacgatgagtacgagccagaggacggcgagtactaagcggtgatgtttctgatcagtcgcggccgcgatatcgctagcgaagttcctattctctagaaagtataggaacttcggatcctctagagtcgaaaaaaaaaaagcatgatgcaaaataaaaaactcaccaaggccatggcaccgagcgttggttttcttgtattccccttagtatgcggcgcgcggcgatgtatgaggaaggtcctcctccctcctacgagagtgtggtgagcgcggcgccagtggcggcggcgctgggttctcccttcgatgctcccctggacccgccgtttgtgcctccgcggtacctgcggcctaccggggggagaaacagcatccgttactctgagttggcacccctattcgacaccacccgtgtgtacctggtggacaacaagtcaacggatgtggcatccctgaactaccagaacgaccacagcaactttctgaccacggtcattcaaaacaatgactacagcccgggggaggcaagcacacagaccatcaatcttgacgaccggtcgcactggggcggcgacctgaaaaccatcctgcataccaacatgccaaatgtgaacgagttcatgtttaccaataagtttaaggcgcgggtgatggtgtcgcgcttgcctactaaggacaatcaggtggagctgaaatacgagtgggtggagttcacgctgcccgagggcaactactccgagaccatgaccatagaccttatgaacaacgcgatcgtggagcactacttgaaagtgggcagacagaacggggttctggaaagcgacatcggggtaaagtttgacacccgcaacttcagactggggtttgaccccgtcactggtcttgtcatgcctggggtatatacaaacgaagccttccatccagacatcattttgctgccaggatgcggggtggacttcacccacagccgcctgagcaacttgttgggcatccgcaagcggcaacccttccaggagggctttaggatcacctacgatgatctggagggtggtaacattcccgcactgttggatgtggacgcctaccaggcgagcttgaaagatgacaccgaacagggcgggggtggcgcaggcggcagcaacagcagtggcagcggcgcggaagagaactccaacgcggcagccgcggcaatgcagccggtggaggacatgaacgatcatgccattcgcggcgacacctttgccacacgggctgaggagaagcgcgctgaggccgaagcagcggccgaagctgccgcccccgctgcgcaacccgaggtcgagaagcctcagaagaaaccggtgatcaaacccctgacagaggacagcaagaaacgcagttacaacctaataagcaatgacagcaccttcacccagtaccgcagctggtaccttgcatacaactacggcgaccctcagaccggaatccgctcatggaccctgctttgcactcctgacgtaacctgcggctcggagcaggtctactggtcgttgccagacatgatgcaagaccccgtgaccttccgctccacgcgccagatcagcaactttccggtggtgggcgccgagctgttgcccgtgcactccaagagcttctacaacgaccaggccgtctactcccaactcatccgccagtttacctctctgacccacgtgttcaatcgctttcccgagaaccagattttggcgcgcccgccagcccccaccatcaccaccgtcagtgaaaacgttcctgctctcacagatcacgggacgctaccgctgcgcaacagcatcggaggagtccagcgagtgaccattactgacgccagacgccgcacctgcccctacgtttacaaggccctgggcatagtctcgccgcgcgtcctatcgagccgcactttttgagcaagcatgtccatccttatatcgcccagcaataacacaggctggggcctgcgcttcccaagcaagatgtttggcggggccaagaagcgctccgaccaacacccagtgcgcgtgcgcgggcactaccgcgcgccctggggcgcgcacaaacgcggccgcactgggcgcaccaccgtcgatgacgccatcgacgcggtggtggaggaggcgcgcaactacacgcccacgccgccgccagtgtccaccgtggacgcggccattcagaccgtggtgcgcggagcccggcgctacgctaaaatgaagagacggcggaggcgcgtagcacgtcgccaccgccgccgacccggcactgccgcccaacgcgcggcggcggccctgcttaaccgcgcacgtcgcaccggccgacgggcggccatgcgagccgctcgaaggctggccgcgggtattgtcactgtgccccccaggtccaggcgacgagcggccgccgcagcagccgcggccattagtgttatgactcagggtcgcaggggcaacgtgtactgggtgcgcgactcggttagcggcctgcgcgtgcccgtgcgcacccgccccccgcgcaactagattgcaataaaaaactacttagactcgtactgttgtatgtatccagcggcggcggcgcgcatcgaagctatgtccaagcgcaaaatcaaagaagagatgctccaggtcatcgcgccggagatctatggccccccgaagaaggaagagcaggattacaagccccgaaagctaaagcgggtcaaaaagaaaaagaaagatgatgatgatgatgaacttgacgacgaggtggaactgttgcacgcgaccgcgcccaggcgacgggtacagtggaaaggtcgacgcgtaagacgtgttttgcgacccggcaccaccgtagtctttacgcccggtgagcgctccacccgcacctacaagcgcgtgtatgatgaggtgtacggcgacgaggacctgcttgagcaggccaacgagcgcctcggggagtttgcctacggaaagcggcataaggacatgctggcgttgccgctggacgagggcaacccaacacctagcctaaagcccgtgacactgcagcaggtgctgcccgcgcttgcaccgtccgaagaaaagcgcggcctaaagcgcgagtctggtgacttggcacccaccgtgcagctgatggtacccaagcgtcagcgactggaagatgtcttggaaaaaatgaccgtggagcctgggctggagcccgaggtccgcgtgcggccaatcaagcaggtggcaccgggactgggcgtgcagaccgtggacgttcagatacccaccaccagtagcactagtattgccactgccacagagggcatggagacacaaacgtccccggttgcctcggcggtggcagatgccgcggtgcaggcggccgctgcggccgcgtccaagacctctacggaggtgcaaacggacccgtggatgtttcgtgtttcagccccccggcgtccgcgccgttcaaggaagtacggcgccgccagcgcgctactgcccgaatatgccctacatccttccatcgcgcctacccccggctatcgtggctacacctaccgccccagaagacgagcaactacccgacgccgaaccaccactggaacccgccgccgccgtcgccgtcgccagcccgtgctggccccgatttccgtgcgcagggtggctcgcgaaggaggcaggaccctggtgctgccaacagcgcgctaccaccccagcatcgtttaaaagccggtctttgtggttcttgcagatatggccctcacctgccgcctccgtttcccggtgccgggattccgaggaagaatgcaccgtaggaggggcatggccggccacggcctgacgggcggcatgcgtcgtgcgcaccaccggcggcggcgcgcgtcgcaccgtcgcatgcgcgccggtatcctgcccctccttattccactgatcgccgcggcgattggcgccgtgcccggaattgcatccgtggccttgcaggcgcagagacactgattaaaaacaagttacatgtggaaaaatcaaaataaaagtctggactctcacgctcgcttggtcctgtaactattttgtagaatggaagacatcaactttgcgtcactggccccgcgacacggctcgcgcccgttcatgggaaactggcaagatatcggcaccagcaatatgagcggtggcgccttcagctggggctcgctgtggagcggcattaaaaatttcggttccgccgttaagaactatggcagcaaagcctggaacagcagcacaggccagatgctgagggacaagttgaaagagcaaaatttccaacaaaaggtggtagatggcctggcctctggcattagcggggtggtggacctggccaaccaggcagtgcaaaataagattaacagtaagcttgatccccgccctcccgtagaggagcctccaccggccgtggagacagtgtctccagaggggcgtggcgaaaagcgtccgcgacccgacagggaagaaactctggtgacgcaaatagacgagcctccctcgtacgaggaggcactaaagcaaggcctgcccaccacccgtcccatcgcgcccatggctaccggagtgctgggccagcacacacccgtaacgctggacctgcctccccccgccgacacccagcagaaacctgtgctgccaggcccgtccgccgttgttgtaacccgtcctagccgcgggtccctgcgccgcgccgccagcggtccgcgatcgttgcggcccgtagccagtggcaactggcaaagcacactgaacagcatcgtgggtttgggggtgcaatccctgaagcgccgacgatgcttctgatagctaacgtgtcgtatgtgtgtcatgtatgcgtccatgtcgccgccagaggagctgctgagccgccgcgcgcccgctttccaagatggctaccccttcgatgatgccgcagtggtcttacatgcacatctcgggccaggacgcctcggagtacctgagccccgggctggtgcagttcgcccgcgccaccgagacgtacttcagcctgaataacaagtttagaaaccccacggtggcgcctacgcacgacgtgaccacagaccggtctcagcgtttgacgctgcggttcatccccgtggaccgcgaggatactgcgtactcgtacaaggcgcggttcaccctagctgtgggtgataaccgtgtgctagacatggcttccacgtactttgacatccgcggcgtgctggacaggggccctacttttaagccctactctggcactgcctacaacgcactggcccccaagggtgcccccaactcgtgcgagtgggaacaaaatgaaactgcacaagtggatgctcaagaacttgacgaagaggagaatgaagccaatgaagctcaggcgcgagaacaggaacaagctaagaaaacccatgtatatgcccaggctccactgtccggaataaaaataactaaagaaggtctacaaataggaactgccgacgccacagtagcaggtgccggcaaagaaattttcgcagacaaaacttttcaacctgaaccacaagtaggagaatctcaatggaacgaagcggatgccacagcagctggtggaagggttcttaaaaagacaactcccatgaaaccctgctatggctcatacgctagacccaccaattccaacggcggacagggcgttatggttgaacaaaatggtaaattggaaagtcaagtcgaaatgcaatttttttccacatccacaaatgccacaaatgaagttaacaatatacaaccaacagttgtattgtacagcgaagatgtaaacatggaaactccagatactcatctttcttataaacctaaaatgggggataaaaatgccaaagtcatgcttggacaacaagcaatgccaaacagaccaaattacattgcttttagagacaattttattggtctcatgtattacaacagcacaggtaacatgggtgtccttgctggtcaggcatcgcagttgaacgctgttgtagatttgcaagacagaaacacagagctgtcctaccagcttttgcttgattcaattggcgacagaacaagatacttttcaatgtggaatcaagctgttgacagctatgatccagatgtcagaattattgagaaccatggaactgaggatgagttgccaaattattgctttcctcttggtggaattgggattactgacacttttcaagctgttaaaacaactgctgctaacggggaccaaggcaatactacctggcaaaaagattcaacatttgcagaacgcaatgaaataggggtgggaaataactttgccatggaaattaacctgaatgccaacctatggagaaatttcctttactccaatattgcgctgtacctgccagacaagctaaaatacaaccccaccaatgtggaaatatctgacaaccccaacacctacgactacatgaacaagcgagtggtggctcctgggcttgtagactgctacattaaccttggggcgcgctggtctctggactacatggacaacgttaatccctttaaccacccccgccatgcgggcctgcgttaccgctccatgttgttgggaaacggccgctacgtgccctttcacattcaggtgccccaaaagttttttgccattaaaaacctcctcctcctgccaggctcatacacatatgaatggaacttcaggaaggatgttaacatggttctgcagagctctctgggaaacgaccttagagttgacggggctagcattaagtttgacagcatttgtctttacgccaccttcttccccatggcccacaacacggcctccacgctggaagccatgctcagaaatgacaccaacgaccagtcctttaatgactacctttccgccgccaacatgctatatcccatacccgccaacgccaccaacgtgcccatctccatcccatcgcgcaactgggcagcatttcgcggttgggccttcacacgcttgaagacaaaggaaaccccttccctgggatcaggctacgacccttactacacctactctggctccataccataccttgacggaaccttctatcttaatcacacctttaagaaggtggccattacttttgactcttctgttagctggccgggcaacgaccgcctgcttactcccaatgagtttgagattaagcgctcagttgacggggagggctataacgtagctcagtgcaacatgacaaaggactggttcctagtgcagatgttggccaactacaatattggctaccagggcttctacattccagaaagctacaaagaccgcatgtactcgttcttcagaaacttccagcccatgagccggcaagtggtggacgatactaaatacaaagattatcagcaggttggaattatccaccagcataacaactcaggcttcgtaggctacctcgctcccaccatgcgcgagggacaagcttaccccgctaatgttccctacccactaataggcaaaaccgcggttgatagtattacccagaaaaagtttctttgcgaccgcaccctgtggcgcatccccttctccagtaactttatgtccatgggtgcgctcacagacctgggccaaaaccttctctacgcaaactccgcccacgcgctagacatgacctttgaggtggatcccatggacgagcccacccttctttatgttttgtttgaagtctttgacgtggtccgtgtgcaccagccgcaccgcggcgtcatcgagaccgtgtacctgcgcacgcccttctcggccggcaacgccacaacataaagaagcaagcaacatcaacaacagctgccgccatgggctccagtgagcaggaactgaaagccattgtcaaagatcttggttgtgggccatattttttgggcacctatgacaagcgcttcccaggctttgtttccccacacaagctcgcctgcgccatagttaacacggccggtcgcgagactgggggcgtacactggatggcctttgcctggaacccgcgctcaaaaacatgctacctctttgagccctttggcttttctgaccaacgtctcaagcaggtttaccagtttgagtacgagtcactcctgcgccgtagcgccattgcctcttcccccgaccgctgtataacgctggaaaagtccacccaaagcgtgcaggggcccaactcggccgcctgtggcctattctgctgcatgtttctccacgcctttgccaactggccccaaactcccatggatcacaaccccaccatgaaccttattaccggggtacccaactccatgcttaacagtccccaggtacagcccaccctgcgccgcaaccaggaacagctctacagcttcctggagcgccactcgccctacttccgcagccacagtgcgcaaattaggagcgccacttctttttgtcacttgaaaaacatgtaaaaataatgtactaggagacactttcaataaaggcaaatgtttttatttgtacactctcgggtgattatttacccccacccttgccgtctgcgccgtttaaaaatcaaaggggttctgccgcgcatcgctatgcgccactggcagggacacgttgcgatactggtgtttagtgctccacttaaactcaggcacaaccatccgcggcagctcggtgaagttttcactccacaggctgcgcaccatcaccaacgcgtttagcaggtcgggcgccgatatcttgaagtcgcagttggggcctccgccctgcgcgcgcgagttgcgatacacagggttacagcactggaacactatcagcgccgggtggtgcacgctggccagcacgctcttgtcggagatcanatccgcgtccaggtcctccgcgttgctcagggcgaacggagtcaactttggtagctgccttcccaaaaagggtgcatgcccaggctttgagttgcactcgcaccgtagtggcatcagaaggtgaccgtgcccagtctgggcgttaggatacagcgcctgcatgaaagccttgatctgcttaaaagccacctgagcctttgcgccttcagagaagaacatgccgcaagacttgccggaaaactgattggccggacaggccgcgtcatgcacgcagcaccttgcgtcggtgttggagatctgcaccacatttcggccccaccggttcttcacgatcttggccttgctagactgctccttcagcgcgcgctgcccgttttcgctcgtcacatccatttcaatcacgtgctccttatttatcataatgctcccgtgtagacacttaagctcgccttcgatctcagcgcagcggtgcagccacaacgcgcagcccgtgggctcgtggtgcttgtaggttacctctgcaaacgactgcaggtacgcctgcaggaatcgccccatcatcgtcacaaaggtcttgttgctggtgaaggtcagctgcaacccgcggtgctcctcgtttagccaggtcttgcatacggccgccagagcttccacttggtcaggcagtagcttgaagtttgcctttagatcgttatccacgtggtacttgtccatcaacgcgcgcgcagcctccatgcccttctcccacgcagacacgatcggcaggctcagcgggtttatcaccgtgctttcactttccgcttcactggactcttccttttcctcttgcatccgcataccccgcgccactgggtcgtcttcattcagccgccgcaccgtgcgcttacctcccttgccgtgcttgattagcaccggtgggttgctgaaacccaccatttgtagcgccacatcttctctttcttcctcgctgtccacgatcacctctggggatggcgggcgctcgggcttgggagaggggcgcttctttttctttttggacgcaatggccaaatccgccgtcgaggtcgatggccgcgggctgggtgtgcgcggcaccagcgcatcttgtgacgagtcttcttcgtcctcggactcgagacgccgcctcagccgcttttttgggggcgcgcggggaggcggcggcgacggcgacggggacgagacgtcctccatggttggtggacgtcgcgccgcaccgcgtccgcgctcgggggtggtttcgcgctgctcctcttcccgactggccatttccttctcctataggcagaaaaagatcatggagtcagtcgagaaggaggacagcctaaccgccccctttgagttcgccaccaccgcctccaccgatgccgccaacgcgcctaccaccttccccgtcgaggcacccccgcttgaggaggaggaagtgattatcgagcaggacccaggttttgtaagcgaagacgacgaagatcgctcagtaccaacagaggataaaaagcaagaccaggacgacgcagaggcaaacgaggaacaagtcgggcggggggaccaaaggcatggcgactacctagatgtgggagacgacgtgctgttgaagcatctgcagcgccagtgcgccattatctgcgacgcgttgcaagagcgcagcgatgtgcccctcgccatagcggatgtcagccttgcctacgaacgccacctgttctcaccgcgcgtaccccccaaacgccaagaaaacggcacatgcgagcccaacccgcgcctcaacttctaccccgtatttgccgtgccagaggtgcttgccacctatcacatctttttccaaaactgcaagatacccctatcctgccgtgccaaccgcagccgagcggacaagcagctggccttgcggcagggcgctgtcatacctgatatcgcctcgctcgacgaagtgccaaaaatctttgagggtcttggacgcgacgagaagcgcgcggcaaacgctctgcaacaagaaaacagcgaaaatgaaagtcactgtggagtgctggtggaacttgagggtgacaacgcgcgcctagccgtgctgaaacgcagcatcgaggtcacccactttgcctacccggcacttaacctaccccccaaggttatgagcacagtcatgagcgagctgatcgtgcgccgtgcacgacccctggagagggatgcaaacttgcaagaacaaaccgaggagggcctacccgcagttggcgatgagcagctggcgcgctggcttgagacgcgcgagcctgccgacttggaggagcgacgcaagctaatgatggccgcagtgcttgttaccgtggagcttgagtgcatgcagcggttctttgctgacccggagatgcagcgcaagctagaggaaacgttgcactacacctttcgccagggctacgtgcgccaggcctgcaaaatttccaacgtggagctctgcaacctggtctcctaccttggaattttgcacgaaaaccgccttgggcaaaacgtgcttcattccacgctcaagggcgaggcgcgccgcgactacgtccgcgactgcgtttacttatttctgtgctacacctggcaaacggccatgggcgtgtggcagcagtgcctggaggagcgcaacctgaaggagctgcagaagctgctaaagcaaaacttgaaggacctatggacggccttcaacgagcgctccgtggccgcgcacctggcggacattatcttccccgaacgcctgcttaaaaccctgcaacagggtctgccagacttcaccagtcaaagcatgttgcaaaactttaggaactttatcctagagcgttcaggaattctgcccgccacctgctgtgcgcttcctagcgactttgtgcccattaagtaccgtgaatgccctccgccgctttggggtcactgctaccttntgcagctagccaactaccttgcctaccactccgacatcatggaagacgtgagcggtgacggcctactggagtgtcactgtcgctgcaacctatgcaccccgcaccgctccctggtctgcaattcacaactgcttagcgaaagtcaaattatcggtacctttgagctgcagggtccctcgcctgacgaaaagtccgcggctccggggttgaaactcactccggggctgtggacgtcggcttaccttcgcaaatttgtacctgaggactaccacgcccacgagattaggttctacgaagaccaatcccgcccgccaaatgcggagcttaccgcctgcgtcattacccagggccacatccttggccaattgcaagccattaacaaagcccgccaagagtttctgctacgaaagggacggggggtttacttggacccccagtccggcgaggagctcaacccaatccccccgccgccgcagccctatcagcagccgcgggcccttgcttcccaggatggcacccaaaaagaagctgcagctgccgccgccgccacccacggacgaggaggaatactgggacagtcaggcagaggaggttttggacgaggaggaggagatgatggaagactgggacagcctagacgaggaagcttccgaggccgaagaggtgtcagacgaaacaccgtcaccctcggtcgcattcccctcgccggcgccccagaaatcggcaaccgttcccagcattgctacaacctccgctcctcaggcgccgccggcactgcccgttcgccgacccaaccgtagatgggacaccactggaaccagggccggtaagtctaagcagccgccgccgttagcccaagagcaacaacagcgccaaggctaccgctcgtggcgcgtgcacaagaacgccatagttgcttgcttgcaagactgtgggggcaacatctccttcgcccgccgctttcttctctaccatcacggcgtggccttcccccgtaacatcctgcattactaccgtcatctctacagcccctactgcaccggcggcagcggcagcaacagcagcggccacgcagaagcaaaggcgaccggatagcaagactctgacaaagcccaagaaatccacagcggcggcagcagcaggaggaggagcactgcgtctggcgcccaacgaacccgtatcgacccgcgagcttagaaacaggatttttcccactctgtatgctatatttcaacagagcaggggccaagaacaagagctgaaaataaaaaacaggtctctgcgctccctcacccgcagctgcctgtatcacaaaagcgaagatcagcttcggcgcacgctggaagacgcggaggctctcttcagcaaatactgcgcgctgactcttaaggactagtttcgcgccctttctcaaatttaagcgcgaaaactacgtcatctccagcggccacacccggcgccagcacctgtcgtcagcgccattatgagcaaggaaattcccacgccctacatgtggagttaccagccacaaatgggacttgcggctggagctgcccaagactactcaacccgaataaactacatgagcgcgggaccccacatgatatcccgggtcaacggaatccgcgcccaccgaaaccgaattctcctcgaacaggcggctattaccaccacacctcgtaataaccttaatccccgtagttggcccgctgccctggtgtaccaggaaagtcccgctcccaccactgtggtacttcccagagacgcccaggccgaagttcagatgactaactcaggggcgcagcttgcgggcggctttcgtcacagggtgcggtcgcccgggcagggtataactcacctgaaaatcagagggcgaggtattcagctcaacgacgagtcggtgagctcctctcttggtctccgtccggacgggacatttcagatcggcggcgctggccgctcttcatttacgccccgtcaggcgatcctaactctgcagacctcgtcctcggagccgcgctccggaggcattggaactctacaatttattgaggagttcgtgccttcggtttacttcaaccccttttctggacctcccggccactacccggaccagtttattcccaactttgacgcggtaaaagactcggcggacggctacgactgacagatctgagctcgcggccgcgatatcgctagcgaagttcctattctctagaaagtataggaacttcgatcctctagagtcgacctgcaggcatgcaagcttggcactgcaataaattacttacttaaaatcagtcagcaaatctttgtccagcttattcagcatcacctcctttccctcctcccaactctggtatttcagcagccttttagctgcgaactttctccaaagtctaaatgggatgtcaaattcctcatgttcttgtccctccgcacccactatcttcatattgttgcagatgaaacgcgccagaccgtctgaagacaccttcaaccctgtgtacccatatgacacggaaaccggccctccaactgtgcctttccttacccctccctttgtgtcgccaaatgggttccaagaaagtccccccggagtgctttctttgcgtctttcagaacctttggttacctcacacggcatgcttgcgctaaaaatgggcagcggcctgtccctggatcaggcaggcaaccttacatcaaatacaatcactgtttctcaaccgctaaaaaaaacaaagtccaatataactttggaaacatccgcgccccttacagtcagctcaggcgccctaaccatggccacaacttcgcctttggtggtctctgacaacactcttaccatgcaatcacaagcaccgctaaccgtgcaagactcaaaacttagcattgctaccaaagagccacttacagtgttagatggaaaactggccctgcagacatcagcccccctctctgccactgataacaacgccctcactatcactgcctcacctcctcttactactgcaaatggtagtctggctgttaccatggaaaacccactttacaacaacaatggaaaacttgggctcaaaattggcggtcctttgcaagtggccaccgactcacatgcactaacactaggtactggtcagggggttgcagttcataacaatttgctacatacaaaagttacaggcgcaatagggtttgatacatctggcaacatggaacttaaaactggagatggcctctatgtggatagcgccggtcctaaccaaaaactacatattaatctaaataccacaaaaggccttgcttttgacaacaccgcaataacaattaacgctggaaaagggttggaatttgaaacagactcctcaaacggaaatcccataaaaacaaaaattggatcaggcatacaatataataccaatggagctatggttgcaaaacttggaacaggcctcagttttgacagctccggagccataacaatgggcagcataaacaatgacagacttactctttggacaacaccagacccatccccaaattgcagaattgcttcagataaagactgcaagctaactctggcgctaacaaaatgtggcagtcaaattttgggcactgtttcagctttggcagtatcaggtaatatggcctccatcaatggaactctaagcagtgtaaacttggttcttagatttgatgacaacggagtgcttatgtcaaattcatcactggacaaacagtattggaactttagaaacggggactccactaacggtcaaccatacacttatgctgttgggtttatgccaaacctaaaagcttacccaaaaactcaaagtaaaactgcaaaaagtaatattgttagccaggtgtatcttaatggtgacaagtctaaaccattgcattttactattacgctaaatggaacagatgaaaccaaccaagtaagcaaatactcaatatcattcagttggtcctggaacagtggacaatacactaatgacaaatttgccaccaattcctataccttctcctacattgcccaggaataaagaatcgtgaacctgttgcatgttatgtttcaacgtgtttatttttcaattcgtattagtcatcgctattaccatggtgatgcggttttggcagtacatcaatgggcgtggatagcggtttgactcacggggatttccaagtctccaccccattgacgtcaatgggagtttgttttggcaccaaaatcaacgggactttccaaaatgtcgtaacaactccgccccattgacgcaaatgggcggtaggcgtgtacggtgggaggtctatataagcagagctggtttagtgaaccgtcagatccgctagagatccaccatgtttgtctttctcgtgctgctgcccctcgtgagcagccagtgcgtcaatctgacaacaaggacccagctgccccccgcctacaccaactccttcacaagaggcgtgtattaccccgataaggtcttcagatccagcgtcctccacagcacccaagatttgtttctgcctttcttcagcaacgtgacatggttccacgccattcatgtcagcggcacaaacggcacaaagaggtttgacaaccccgtgctccccttcaacgacggcgtgtacttcgccagcacagagaaatccaatatcattaggggctggatcttcggcacaacactggattccaagacccagtctctgctcattgtgaataacgccaccaacgtggtgattaaggtctgtgagtttcagttctgcaacgacccctttctgggagtctactaccacaagaataataagagctggatggagtccgagtttagggtgtacagctccgccaacaactgtaccttcgaatacgtgtcccagcctttcctcatggatctggagggcaagcaaggcaatttcaaaaatctgagagagttcgtgttcaaaaacattgatggatacttcaaaatctacagcaagcatacccccattaatctggtgagggatctgccccaaggattctccgctctggaacctctggtggatctgcccattggcattaacatcacaagattccagaccctcctcgccctccatagatcctatctgacccccggcgactcctccagcggatggacagccggagctgccgcctactacgtgggctatctgcagccaagaacctttctgctgaagtacaacgagaacggcaccatcacagacgctgtcgattgcgctctcgaccctctgagcgagaccaaatgcacactgaagagcttcaccgtggaaaagggcatctatcagaccagcaacttcagagtgcagcctaccgagagcattgtgaggtttcccaacatcaccaatctgtgtcctttcggcgaggtctttaatgccacaaggttcgcttccgtgtatgcttggaataggaagaggatcagcaattgcgtcgccgactattccgtcctctataacagcgcctccttctccaccttcaaatgttatggcgtgtcccccaccaagctcaacgacctctgcttcaccaatgtgtacgctgactccttcgtcattaggggcgacgaggtgaggcaaattgcccccggccagaccggcaagattgctgattacaactacaaactgcccgacgattttaccggctgcgtgatcgcttggaactccaacaatctggactccaaagtgggcggaaactacaattacctctacagactctttagaaaaagcaatctgaagcccttcgagagagacatctccaccgaaatctaccaagccggaagcacaccttgcaatggcgtcgagggatttaactgctacttccctctgcagagctacggctttcaacctaccaacggcgtcggatatcaaccctatagggtggtcgtgctgagctttgaactgctgcatgctcccgccaccgtctgcggacctaagaagagcaccaatctcgtcaaaaacaagtgcgtgaacttcaacttcaatggactgaccggcaccggcgtgctgaccgagagcaataagaagtttctgcccttccagcagttcggaagggatattgccgataccacagatgctgtgagggacccccaaaccctcgagattctggatatcaccccttgcagcttcggaggagtgtccgtgatcacccccggaacaaacacctccaatcaagtggctgtgctgtaccaagacgtgaactgcacagaagtccccgtggccatccatgccgaccagctgacccctacatggagagtgtactccaccggcagcaatgtgttccagacaagagccggatgcctcattggagctgaacacgtcaacaacagctacgagtgcgacattcccatcggcgccggcatttgtgcctcctatcagacccagaccaacagcccaagaagggctagaagcgtcgcttcccaatccatcattgcctacaccatgtctctgggagccgaaaactccgtcgcctactccaacaatagcatcgccatccccaccaattttaccatctccgtgaccacagagattctgcccgtgtccatgacaaagacatccgtggactgcaccatgtacatctgtggcgacagcaccgagtgtagcaatctgctgctgcaatatggcagcttctgcacccagctgaacagagccctcaccggcatcgccgtcgaacaagacaagaacacccaagaggtgttcgcccaagtgaagcaaatctacaagaccccccctatcaaagatttcggaggattcaactttagccagattctgcccgatcctagcaagccttccaagaggagcttcatcgaggatctgctgtttaataaggtgacactggccgacgctggcttcattaaacagtacggcgattgtctgggcgacatcgctgctagggatctgatctgcgctcagaagttcaacggactgacagtcctccctcctctgctgaccgacgagatgatcgctcagtataccagcgctctgctggctggaaccattaccagcggctggacattcggcgctggagccgccctccaaattccctttgccatgcagatggcctatagattcaacggcattggcgtcacccaaaatgtgctgtatgaaaatcagaagctgattgctaaccaattcaatagcgccattggcaagatccaagactctctgagctccacagccagcgccctcggaaagctgcaagacgtggtgaatcaaaacgcccaagctctgaacacactggtgaaacagctcagcagcaactttggagccatcagcagcgtgctcaatgatatcctctctaggctggaccctccggaggccgaagtccagatcgatagactcatcaccggcagactccaatctctgcagacatacgtcacccaacagctcattagagctgccgaaatcagagcctccgccaatctggccgccaccaagatgtccgagtgcgtgctgggacagagcaagagagtggacttctgtggcaagggataccatctgatgagcttcccccagagcgctccccatggagtggtctttctgcatgtcacatacgtgcccgcccaagagaagaacttcaccaccgctcccgccatttgccacgatggaaaggcccactttcccagagaaggagtgttcgtgagcaacggcacacactggtttgtcacccagagaaatttttacgagccccagattatcaccaccgacaacaccttcgtgtccggaaactgcgatgtcgtgattggcatcgtgaacaacacagtctacgaccctctgcagcccgaactcgacagcttcaaggaagagctggacaagtacttcaagaatcacacatcccccgacgtggatctgggcgacattagcggcattaatgcctccgtcgtcaacattcagaaggagattgatagactgaatgaagtcgccaagaacctcaatgagtctctgattgatctgcaagagctgggcaagtacgagcaatacatcaaatggccttggtacatctggctgggattcatcgctggactcatcgccatcgtgatggtcaccattatgctgtgttgcatgaccagctgctgcagctgtctgaagggctgctgcagctgcggaagctgctgcaagtttgacgaagacgactccgagcccgtgctgaagggcgtcaagctgcattatacataaactagtgctggaattcgcccttatagagtgctggaattcgcccttatagagtgctggaattcgcccttatatctagtaacggccgccagtgtgctggaattcgcccttataacttcgtatagcatacattatacgaagttattgttgacaattaatcatcggcatagtatatcggcatagtataatacgacaaggtgaggaactaaaccatggccaagttgaccagtgccgttccggtgctcaccgcgcgcgacgtcgccggagcggtcgagttctggaccgaccggctcgggttctcccgggacttcgtggaggacgacttcgccggtgtggtccgggacgacgtgaccctgttcatcagcgcggtccaggaccaggtggtgccggacaacaccctggcctgggtgtgggtgcgcggcctggacgagctgtacgccgagtggtcggaggtcgtgtccacgaacttccgggacgcctccgggccggccatgaccgagatcggcgagcagccgtgggggcgggagttcgccctgcgcgacccggccggcaactgcgtgcacttcgtggccgaggagcaggactgaataacttcgtatagcatacattatacgaagttataagggcgaattctgcagatatccatcctttaaaaaacctcccacacctccccctgaacctgaaacataaaatgaatgcaattgttgttgttaacttgtttattgcagcttataatggttacaaataaagcaatagcatcacaaatttcacaaataaagcatttttttcactgcattctagttgtggtttgtccaaactcatcaatgtatcttaacaacgtgtttatttttcaattgcagaaagaattgcagaaaatttcaagtcatttttcattcagtagtatagccccaccaccacatagcttatactaatcaccgtaccttaatcaaactcacagaaccctagtattcaacctgccacctccctcccaacacacagagtacacagtcctttctccccggctggccttaaacagcatcatatcatgggtaacagacatattcttaggtgttatattccacacggtctcctgtcgagccaaacgctcatcagtgatgttaataaactccccgggcagctcgcttaagttcatgtcgctgtccagctgctgagccacaggctgctgtccaacttgcggttgctcaacgggcggcgaaggagaagtccacgcctacatgggggtagagtcataatcgtgcatcaggatagggcggtggtgctgcagcagcgcgcgaataaactgctgccgccgccgctccgtcctgcaggaatacaacatggcagtggtctcctcagcgatgattcgcaccgcccgcagcataaggcgccttgtcctccgggcacagcagcgcaccctgatctcacttaagtcagcacagtaactgcagcacagtaccacaatattgtttaaaatcccacagtgcaaggcgctgtatccaaagctcatggcggggaccacagaacccacgtggccatcataccacaagcgcaggtagattaagtggcgacccctcataaacacgctggacataaacattacctcttttggcatgttgtaattcaccacctcccggtaccatataaacctctgattaaacatggcgccatccaccaccatcctaaaccagctggccaaaacctgcccgccggctatgcactgcagggaaccgggactggaacaatgacagtggagagcccaggactcgtaaccatggatcatcatgctcgtcatgatatcaatgttggcacaacacaggcacacgtgcatacacttcctcaggattacaagctcctcccgcgtcagaaccatatcccagggaacaacccattcctgaatcagcgtaaatcccacactgcagggaagacctcgcacgtaactcacgttgtgcattgtcaaagtgttacattcgggcagcagcggatgatcctccagtatggtagcgcgtgtctctgtctcaaaaggaggtaggcgatccctactgtacggagtgcgccgagacaaccgagatcgtgttggtcgtagtgtcatgccaaatggaacgccggacgtagtcatatttcctgaagcaaaaccaggtgcgggcgtgacaaacagatctgcgtctccggtctcgtcgcttagctcgctctgtgtagtagttgtagtatatccactctctcaaagcatccaggcgccccctggcttcgggttctatgtaaactccttcatgcgccgctgccctgataacatccaccaccgcagaataagccacacccagccaacctacacattcgttctgcgagtcacacacgggaggagcgggaagagctggaagaaccatgttttttttttttattccaaaagattatccaaaacctcaaaatgaagatctattaagtgaacgcgctcccctccggtggcgtggtcaaactctacagccaaagaacagataatggcatttgtaagatgttgcacaatggcttccaaaaggcaaactgccctcacgtccaagtggacgtaaaggctaaacccttcanggtgaatctcctctataaacattccagcaccttcaaccatgcccaaataattttcatctcgccaccttatcaatatgtctctaagcaaatcccgaatattaagtccggccattgtaaaaatctgctccagagcgccctccaccttcagcctcaagcagcgaatcatgattgcaaaaattcaggttcctcacagacctgtataagattcaaaagcggaacattaacaaaaataccgcgatcccgtaggtcccttcgcagggccagctgaacataatcgtgcaggtctgcacggaccagcgcggccacttccccgccaggaaccatgacaaaagaacccacactgattatgacacgcatactcggagctatgctaaccagcgtagccccgatgtaagcttgttgcatgggcggcgatataaaatgcaaggtactgctcaaaaaatcaggcaaagcctcgcgcaaaaaagcaagcacatcgtagtcatgctcatgcagataaaggcaggtaagttccggaaccaccacagaaaaagacaccatttttctctcaaacatgtctgcgggttcctgcataaacacaaaataaaataacaaaaaaaaaaaaacatttaaacattagaagcctgtcttacaacaggaaaaacaacccttataagcataagacggactacggccatgccggcgtgaccgtaaaaaaactggtcaccgtgattaaaaagcaccaccgacagttcctcggtcatgtccggagtcataatgtaagactcggtaaacacatcaggttggttaacatcggtcagtgctaaaaagcgaccgaaatagcccgggggaatacatacccgcaggcgtagagacaacattacagcccccataggaggtataacaaaattaataggagagaaaaacacataaacccctgaaaaaccctcctgcccctaggcaaaatagcaccctcccgctccagaacaacatacagcgcttccacagcggcagccataacagtcagccttaccagtaaaaaaacctattaaaaaacaccactcgacacggcaccagctcaatcagtcacagtgtaaaaagggccaagtacagagcgagtatatataggactaaaaaatgacgtaacggttaaagtccacaaaaaccacccagaaaaccgcacgcgaacctacgcccagaaacgaaagccaaaaaacccacaacttcctcaaatcttcacttccgttttcccacgatacgtcacttcccattttaaaaaaaaactacaattcccaatacatgcaagttactccgccctaaaacctacgtcacccgccccgttcccacgccccgcgccacgtcacaaactccaccccctcattatcatattggcttcaatccaaaataaggtatattattgatgatggcgat

SEQ ID NO: 30 - DNA, 36859 bp, Artificial
  nucleic acid sequence of SC-Ad6-(delta)III-(delta)E3ADP-I-CMV-Spike-3X-L
  misc_feature (7190)..(7190): n is a, c, g, or t
  misc_feature (21091)..(21091): n is a, c, g, or t
  misc_feature (24027)..(24027): n is a, c, g, or t
  misc_feature (35449)..(35449): n is a, c, g, or t
cgccatcatcaataatataccttattttggattgaagccaatatgataatgagggggtggagtttgtgacgtggcgcggggcgtgggaacggggcgggtgacgtagtagtgtggcggaagtgtgatgttgtaagtgtggcggaacacatgtaagcgccggatgtggtaaaagtgacgtttttggtgtgcgccggtgtacacgggaagtgacaattttcgcgcggttttaggcggatgttgtagtaaatttgggcgtaaccaagtaatatttggccattttcgcgggaaaactgaataagaggaagtgaaatctgaataattctgtgttactcatagcgcgtaatatttgtctagggccgcggggactttgaccgtttacgtggagactcgcccaggtgtttttctcaggtgttttccgcgttccgggtcaaagttggcgttttattattatagtcagctgacgcgcagtgtatttatacccggtgagttcctcaagaggccactcttgagtgccagcgagtagagttttctcctccgagccgctccgacaccgggactgaaaatgagacatattatctgccacggaggtgttattaccgaagaaatggccgccagtcttttggaccagctgatcgaagaggtactggctgataatcttccacctcctagccattttgaaccacctacccttcacgaactgtatgatttagacgtgacggcccccgaagatcccaacgaggaggcggtttcgcagatttttcccgagtctgtaatgttggcggtgcaggaagggattgacttattcacttttccgccggcgcccggttctccggagccgcctcacctttcccggcagcccgagcagccggagcagagagccttgggtccggtttctatgccaaaccttgtgccggaggtgatcgatcttacctgccacgaggctggctttccacccagtgacgacgaggatgaagagggtgaggagtttgtgttagattatgtggagcaccccgggcacggttgcaggtcttgtcattatcaccggaggaatacgggggacccagatattatgtgttcgctttgctatatgaggacctgtggcatgtttgtctacagtaagtgaaaaattatgggcagtgggtgatagagtggtgggtttggtgtggtaattttttttttaatttttacagttttgtggtttaaagaattttgtattgtgattttttaaaaggtcctgtgtctgaacctgagcctgagcccgagccagaaccggagcctgcaagacctacccggcgtcctaaattggtgcctgctatcctgagacgcccgacatcacctgtgtctagagaatgcaatagtagtacggatagctgtgactccggtccttctaacacacctcctgagatacacccggtggtcccgctgtgccccattaaaccagttgccgtgagagttggtgggcgtcgccaggctgtggaatgtatcgaggacttgcttaacgagtctgggcaacctttggacttgagctgtaaacgccccaggccataaggtgtaaacctgtgattgcgtgtgtggttaacgcctttgtttgctgaatgagttgatgtaagtttaataaagggtgagataatgtttaacttgcatggcgtgttaaatggggcggggcttaaagggtatataatgcgccgtgggctaatcttggttacatctgacctcatggaggcttgggagtgtttggaagatttttctgctgtgcgtaacttgctggaacagagctctaacagtacctcttggttttggaggtttctgtggggctcctcccaggcaaagttagtctgcagaattaaggaggattacaagtgggaatttgaagagcttttgaaatcctgtggtgagctgtttgattctttgaatctgggtcaccaggcgcttttccaagagaaggtcatcaagactttggatttttccacaccggggcgcgctgcggctgctgttgcttttttgagttttataaaggataaatggagcgaagaaacccatctgagcggggggtacctgctggattttctggccatgcatctgtggagagcggtggtgagacacaagaatcgcctgctactgttgtcttccgtccgcccggcaataataccgacggaggagcaacagcaggaggaagccaggcggcggcggcggcaggagcagagcccatggaacccgagagccggcctggaccctcgggaatgaatgttgtacaggtggctgaactgtttccagaactgagacgcattttaaccattaacgaggatgggcaggggctaaagggggtaaagagggagcggggggcttctgaggctacagaggaggctaggaatctaacttttagcttaatgaccagacaccgtcctgagtgtgttacttttcagcagattaaggataattgcgctaatgagcttgatctgctggcgcagaagtattccataaagcagctgaccacttactggctgcagccaggggatgattttgaggaggctattagggtatatgcaaaggtggcacttaggccagattgcaagtacaagattagcaaacttgtaaatatcaggaattgttgctacatttctgggaacggggccgaggtggagatagatacggaggatagggtggcctttagatgtagcatgataaatatgtggccgggggtgcttggcatggacggggtggttattatgaatgtgaggtttactggtcccaattttagcggtacggttttcctggccaataccaatcttatcctacacggtgtaagcttctatgggtttaacaatacctgtgtggaagcctggaccgatgtaagggttcggggctgtgccttttactgctgctggaagggggtggtgtgtcgccccaaaagcagggcttcaattaagaaatgcctgtttgaaaggtgtaccttgggtatcctgtctgagggtaactccagggtgcgccacaatgtggcctccgactgtggttgctttatgctagtgaaaagcgtggctgtgattaagcataacatggtgtgtggcaactgcgaggacagggcctctcagatgctgacctgctcggacggcaactgtcacttgctgaagaccattcacgtagccagccactctcgcaaggcctggccagtgtttgagcacaacatactgacccgctgttccttgcatttgggtaacaggaggggggtgttcctaccttaccaatgcaatttgagtcacactaagatattgcttgagcccgagagcatgtccaaggtgaacctgaacggggtgtttgacatgaccatgaagatctggaaggtgctgaggtacgatgagacccgcaccaggtgcagaccctgcgagtgtggcggtaaacatattaggaaccagcctgtgatgctggatgtgaccgaggagctgaggcccgatcacttggtgctggcctgcacccgcgctgagtttggctctagcgatgaagatacagattgaggtactgaaatgtgtgggcgtggcttaagggtgggaaagaatatataaggtgggggtctcatgtagttttgtatctgttttgcagcagccgccgccatgagcgccaactcgtttgatggaagcattgtgagctcatatttgacaacgcgcatgcccccatgggccggggtgcgtcagaatgtgatgggctccagcattgatggtcgccccgtcctgcccgcaaactctactaccttgacctacgagaccgtgtctggaacgccgttggagactgcagcctccgccgccgcttcagccgctgcagccaccgcccgcgggattgtgactgactttgctttcctgagcccgcttgcaagcagtgcagcttcccgttcatccgcccgcgatgacaagttgacggctcttttggcacaattggattctttgacccgggaacttaatgtcgtttctcagcagctgttggatctgcgccagcaggtttctgccctgaaggcttcctcccctcccaatgcggtttaaaacataaataaaaaccagactctgtttggatttggatcaagcaagtgtcttgctgtctttatttaggggttttgcgcgcgcggtaggcccgggaccagcggtctcggtcgttgagggtcctgtgtattttttccaggacgtggtaaaggtgactctggatgttcagatacatgggcataagcccgtctctggggtggaggtagcaccactgcagagcttcatgctgcggggtggtgttgtagatgatccagtcgtagcaggagcgctgggcgtggtgcctaaaaatgtctttcagtagcaagctgattgccaggggcaggcccttggtgtaagtgtttacaaagcggttaagctgggatgggtgcatacgtggggatatgagatgcatcttggactgtatttttaggttggctatgttcccagccatatccctccggggattcatgttgtgcagaaccaccagcacagtgtatccggtgcacttgggaaatttgtcatgtagcttagaaggaaatgcgtggaagaacttggagacgcccttgtgacctccaagattttccatgcattcgtccataatgatggcaatgggcccacgggcggcggcctgggcgaagatatttctgggatcactaacgtcatagttgtgttccaggatgagatcgtcataggccatttttacaaagcgcgggcggagggtgccagactgcggtataatggttccatccggcccaggggcgtagttaccctcacagatttgcatttcccacgctttgagttcagatggggggatcatgtctacctgcggggcgatgaagaaaaccgtttccggggtaggggagatcagctgggaagaaagcaggttcctaagcagctgcgacttaccgcagccggtgggcccgtaaatcacacctattaccggctgcaactggtagttaagagagctgcagctgccgtcatccctgagcaggggggccacttcgttaagcatgtccctgacttgcatgttttccctgaccaaatccgccagaaggcgctcgccgcccagcgatagcagttcttgcaaggaagcaaagtttttcaacggtttgaggccgtccgccgtaggcatgcttttgagcgtttgaccaagcagttccaggcggtcccacagctcggtcacgtgctctacggcatctcgatccagcatatctcctcgtttcgcgggttggggcggctttcgctgtacggcagtagtcggtgctcgtccagacgggccagggtcatgtctttccacgggcgcagggtcctcgtcagcgtagtctgggtcacggtgaaggggtgcgctccgggttgcgcgctggccagggtgcgcttgaggctggtcctgctggtgctgaagcgctgccggtcttcgccctgcgcgtcggccaggtagcatttgaccatggtgtcatagtccagcccctccgcggcgtggcccttggcgcgcagcttgcccttggaggaggcgccgcacgaggggcagtgcagacttttaagggcgtagagcttgggcgcgagaaataccgattccggggagtaggcatccgcgccgcaggccccgcagacggtctcgcattccacgagccaggtgagctctggccgttcggggtcaaaaaccaggtttcccccatgctttttgatgcgtttcttacctctggtttccatgagccggtgtccacgctcggtgacgaaaaggctgtccgtgtccccgtatacagacttgagaggcctgtcctcgagcggtgttccgcggtcctcctcgtatagaaactcggaccactctgagacgaaggctcgcgtccaggccagcacgaaggaggctaagtgggaggggtagcggtcgttgtccactagggggtccactcgctccagggtgtgaagacacatgtcgccctcttcggcatcaaggaaggtgattggtttataggtgtaggccacgtgaccgggtgttcctgaaggggggctataaaagggggtgggggcgcgttcgtcctcactctcttccgcatcgctgtctgcgagggccagctgttggggtgagtactccctctcaaaagcgggcatgacttctgcgctaagattgtcagtttccaaaaacgaggaggatttgatattcacctggcccgcggtgatgcctttgagggtggccgcgtccatctggtcagaaaagacaatctttttgttgtcaagcttggtggcaaacgacccgtagagggcgttggacagcaacttggcgatggagcgcagggtttggtttttgtcgcgatcggcgcgctccttggccgcgatgtttagctgcacgtattcgcgcgcaacgcaccgccattcgggaaagacggtggtgcgctcgtcgggcactaggtgcacgcgccaaccgcggttgtgcagggtgacaaggtcaacgctggtggctacctctccgcgtaggcgctcgttggtccagcagaggcggccgcccttgcgcgagcagaatggcggtagtgggtctagctgcgtctcgtccggggggtctgcgtccacggtaaagaccccgggcagcaggcgcgcgtcgaagtagtctatcttgcatccttgcaagtctagcgcctgctgccatgcgcgggcggcaagcgcgcgctcgtatgggttgagtgggggaccccatggcatggggtgggtgagcgcggaggcgtacatgccgcaaatgtcgtaaacgtagaggggctctctgagtattccaagatatgtagggtagcatcttccaccgcggatgctggcgcgcacgtaatcgtatagttcgtgcgagggagcgaggaggtcgggaccgaggttgctacgggcgggctgctctgctcggaagactatctgcctgaagatggcatgtgagttggatgatatggttggacgctggaagacgttgaagctggcgtctgtgagacctaccgcgtcacgcacgaaggaggcgtaggagtcgcgcagcttgttgaccagctcggcggtgacctgcacgtctagggcgcagtagtccagggtttccttgatgatgtcatacttatcctgtcccttttttttccacagctcgcggttgaggacaaactcttcgcggtctttccagtactcttggatcggaaacccgtcggcctccgaacggtaagagcctancatgtagaactggttgacggcctggtaggcgcagcatcccttttctacgggtagcgcgtatgcctgcgcggccttccggagcgaggtgtgggtgagcgcaaaggtgtccctaaccatgactttgaggtactggtatttgaagtcagtgtcgtcgcatccgccctgctcccagagcaaaaagtccgtgcgctttttggaacgcgggtttggcagggcgaaggtgacatcgttgaagagtatctttcccgcgcgaggcataaagttgcgtgtgatgcggaagggtcccggcacctcggaacggttgttaattacctgggcggcgagcacgatctcgtcaaagccgttgatgttgtggcccacaatgtaaagttccaagaagcgcgggatgcccttgatggaaggcaattttttaagttcctcgtaggtgagctcttcaggggagctgagcccgtgctctgaaagggcccagtctgcaagatgagggttggaagcgacgaatgagctccacaggtcacgggccattagcatttgcaggtggtcgcgaaaggtcctaaactggcgacctatggccattttttctggggtgatgcagtagaaggtaagcgggtcttgttcccagcggtcccatccaaggtccgcggctaggtctcgcgcggcggtcactagaggctcatctccgccgaacttcatgaccagcatgaagggcacgagctgcttcccaaaggcccccatccaagtataggtctctacatcgtaggtgacaaagagacgctcggtgcgaggatgcgagccgatcgggaagaactggatctcccgccaccagttggaggagtggctgttgatgtggtgaaagtagaagtccctgcgacgggccgaacactcgtgctggcttttgtaaaaacgtgcgcagtactggcagcggtgcacgggctgtacatcctgcacgaggttgacctgacgaccgcgcacaaggaagcagagtgggaatttgagcccctcgcctggcgggtttggctggtggtcttctacttcggctgcttgtccttgaccgtctggctgctcgaggggagttacggtggatcggaccaccacgccgcgcgagcccaaagtccagatgtccgcgcgcggcggtcggagcttgatgacaacatcgcgcagatgggagctgtccatggtctggagctcccgcggcgtcaggtcaggcgggagctcctgcaggtttacctcgcatagccgggtcagggcgcgggctaggtccaggtgatacctgatttccaggggctggttggtggcggcgtcgatggcttgcaagaggccgcatccccgcggcgcgactacggtaccgcgcggcgggcggtgggccgcgggggtgtccttggatgatgcatctaaaagcggtgacgcgggcgggcccccggaggtagggggggctcgggacccgccgggagagggggcaggggcacgtcggcgccgcgcgcgggcaggagctggtgctgcgcgcggaggttgctggcgaacgcgacgacgcggcggttgatctcctgaatctggcgcctctgcgtgaagacgacgggcccggtgagcttgaacctgaaagagagttcgacagaatcaatttcggtgtcgttgacggcggcctggcgcaaaatctcctgcacgtctcctgagttgtcttgataggcgatctcggccatgaactgctcgatctcttcctcctggagatctccgcgtccggctcgctccacggtggcggcgaggtcgttggagatgcgggccatgagctgcgagaaggcgttgaggcctccctcgttccagacgcggctgtagaccacgcccccttcggcatcgcgggcgcgcatgaccacctgcgcgagattgagctccacgtgccgggcgaagacggcgtagtttcgcaggcgctgaaagaggtagttgagggtggtggcggtgtgttctgccacgaagaagtacataacccagcgccgcaacgtggattcgttgatatcccccaaggcctcaaggcgctccatggcctcgtagaagtccacggcgaagttgaaaaactgggagttgcgcgccgacacggttaactcctcctccagaagacggatgagctcggcgacagtgtcgcgcacctcgcgctcaaaggctacaggggcctcttcttcttcttcaatctcctcttccataagggcctccccttcttcttcttctggcggcggtgggggaggggggacacggcggcgacgacggcgcaccgggaggcggtcgacaaagcgctcgatcatctccccgcggcgacggcgcatggtctcggtgacggcgcggccgttctcgcgggggcgcagttggaagacgccgcccgtcatgtcccggttatgggttggcggggggctgccgtgcggcagggatacggcgctaacgatgcatctcaacaattgttgtgtaggtactccgccaccgagggacctgagcgagtccgcatcgaccggatcggaaaacctctcgagaaaggcgtctaaccagtcacagtcgcaaggtaggctgagcaccgtggcgggcggcagcgggcggcggtcggggttgtttctggcggaggtgctgctgatgatgtaattaaagtaggcggtcttgagacggcggatggtcgacagaagcaccatgtccttgggtccggcctgctgaatgcgcaggcggtcggccatgccccaggcttcgttttgacatcggcgcaggtctttgtagtagtcttgcatgagcctttctaccggcacttcttcttctccttcctcttgtcctgcatctcttgcatctatcgctgcggcggcggcggagtttggccgtaggtggcgccctcttcctcccatgcgtgtgaccccgaagcccctcatcggctgaagcagggccaggtcggcgacaacgcgctcggctaatatggcctgctgcacctgcgtgagggtagactggaagtcgtccatgtccacaaagcggtggtatgcgcccgtgttgatggtgtaagtgcagttggccataacggaccagttaacggtctggtgacccggctgcgagagctcggtgtacctgagacgcgagtaagcccttgagtcaaagacgtagtcgttgcaagtccgcaccaggtactggtatcccaccaaaaagtgcggcggcggctggcggtagaggggccagcgtagggtggccggggctccgggggcgaggtcttccaacataaggcgatgatatccgtagatgtacctggacatccaggtgatgccggcggcggtggtggaggcgcgcggaaagtcacggacgcggttccagatgttgcgcagcggcaaaaagtgctccatggtcgggacgctctggccggtcaggcgcgcgcagtcgttgacgctctagaccgtgcaaaaggagagcctgtaagcgggcactcttccgtggtctggtggataaattcgcaagggtatcatggcggacgaccggggttcgaaccccggatccggccgtccgccgtgatccatgcggttaccgcccgcgtgtcgaacccaggtgtgcgacgtcagacaacgggggagcgctccttttggcttccttccaggcgcggcggatgctgcgctagcttttttggccactggccgcgcgcggcgtaagcggttaggctggaaagcgaaagcattaagtggctcgctccctgtagccggagggttattttccaagggttgagtcgcgggacccccggttcgagtctcgggccggccggactgcggcgaacgggggtttgcctccccgtcatgcaagaccccgcttgcaaattcctccggaaacagggacgagccccttttttgcttttcccagatgcatccggtgctgcggcagatgcgcccccctcctcagcagcggcaagagcaagagcagcggcagacatgcagggcaccctcccctcctcctaccgcgtcaggaggggcgacatccgcggttgacgcggcagcagatggtgattacgaacccccgcggcgccgggcccggcactacctggacttggaggagggcgagggcctggcgcggctaggagcgccctctcctgagcggtacccaagggtgcagctgaagcgtgatacgcgtgaggcgtacgtgccgcggcagaacctgtttcgcgaccgcgagggagaggagcccgaggagatgcgggatcgaaagttccacgcagggcgcgagctgcggcatggcctgaatcgcgagcggttgctgcgcgaggaggactttgagcccgacgcgcgaaccgggattagtcccgcgcgcgcacacgtggcggccgccgacctggtaaccgcatacgagcagacggtgaaccaggagattaactttcaaaaaagctttaacaaccacgtgcgtacgcttgtggcgcgcgaggaggtggctataggactgatgcatctgtgggactttgtaagcgcgctggagcaaaacccaaatagcaagccgctcatggcgcagctgttccttatagtgcagcacagcagggacaacgaggcattcagggatgcgctgctaaacatagtagagcccgagggccgctggctgctcgatttgataaacatcctgcagagcatagtggtgcaggagcgcagcttgagcctggctgacaaggtggccgccatcaactattccatgcttagcctgggcaagttttacgcccgcaagatataccataccccttacgttcccatagacaaggaggtaaagatcgaggggttctacatgcgcatggcgctgaaggtgcttaccttgagcgacgacctgggcgtttatcgcaacgagcgcatccacaaggccgtgagcgtgagccggcggcgcgagctcagcgaccgcgagctgatgcacagcctgcaaagggccctggctggcacgggcagcggcgatagagaggccgagtcctactttgacgcgggcgctgacctgcgctgggccccaagccgacgcgccctggaggcagctggggccggacctgggctggcggtggcacccgcgcgcgctggcaacgtcggcggcgtggaggaatatgacgaggacgatgagtacgagccagaggacggcgagtactaagcggtgatgtttctgatcagtcgcggccgcgatatcgctagcgaagttcctattctctagaaagtataggaacttcggatcctctagagtcgaaaaaaaaaaagcatgatgcaaaataaaaaactcaccaaggccatggcaccgagcgttggttttcttgtattccccttagtatgcggcgcgcggcgatgtatgaggaaggtcctcctccctcctacgagagtgtggtgagcgcggcgccagtggcggcggcgctgggttctcccttcgatgctcccctggacccgccgtttgtgcctccgcggtacctgcggcctaccggggggagaaacagcatccgttactctgagttggcacccctattcgacaccacccgtgtgtacctggtggacaacaagtcaacggatgtggcatccctgaactaccagaacgaccacagcaactttctgaccacggtcattcaaaacaatgactacagcccgggggaggcaagcacacagaccatcaatcttgacgaccggtcgcactggggcggcgacctgaaaaccatcctgcataccaacatgccaaatgtgaacgagttcatgtttaccaataagtttaaggcgcgggtgatggtgtcgcgcttgcctactaaggacaatcaggtggagctgaaatacgagtgggtggagttcacgctgcccgagggcaactactccgagaccatgaccatagaccttatgaacaacgcgatcgtggagcactacttgaaagtgggcagacagaacggggttctggaaagcgacatcggggtaaagtttgacacccgcaacttcagactggggtttgaccccgtcactggtcttgtcatgcctggggtatatacaaacgaagccttccatccagacatcattttgctgccaggatgcggggtggacttcacccacagccgcctgagcaacttgttgggcatccgcaagcggcaacccttccaggagggctttaggatcacctacgatgatctggagggtggtaacattcccgcactgttggatgtggacgcctaccaggcgagcttgaaagatgacaccgaacagggcgggggtggcgcaggcggcagcaacagcagtggcagcggcgcggaagagaactccaacgcggcagccgcggcaatgcagccggtggaggacatgaacgatcatgccattcgcggcgacacctttgccacacgggctgaggagaagcgcgctgaggccgaagcagcggccgaagctgccgcccccgctgcgcaacccgaggtcgagaagcctcagaagaaaccggtgatcaaacccctgacagaggacagcaagaaacgcagttacaacctaataagcaatgacagcaccttcacccagtaccgcagctggtaccttgcatacaactacggcgaccctcagaccggaatccgctcatggaccctgctttgcactcctgacgtaacctgcggctcggagcaggtctactggtcgttgccagacatgatgcaagaccccgtgaccttccgctccacgcgccagatcagcaactttccggtggtgggcgccgagctgttgcccgtgcactccaagagcttctacaacgaccaggccgtctactcccaactcatccgccagtttacctctctgacccacgtgttcaatcgctttcccgagaaccagattttggcgcgcccgccagcccccaccatcaccaccgtcagtgaaaacgttcctgctctcacagatcacgggacgctaccgctgcgcaacagcatcggaggagtccagcgagtgaccattactgacgccagacgccgcacctgcccctacgtttacaaggccctgggcatagtctcgccgcgcgtcctatcgagccgcactttttgagcaagcatgtccatccttatatcgcccagcaataacacaggctggggcctgcgcttcccaagcaagatgtttggcggggccaagaagcgctccgaccaacacccagtgcgcgtgcgcgggcactaccgcgcgccctggggcgcgcacaaacgcggccgcactgggcgcaccaccgtcgatgacgccatcgacgcggtggtggaggaggcgcgcaactacacgcccacgccgccgccagtgtccaccgtggacgcggccattcagaccgtggtgcgcggagcccggcgctacgctaaaatgaagagacggcggaggcgcgtagcacgtcgccaccgccgccgacccggcactgccgcccaacgcgcggcggcggccctgcttaaccgcgcacgtcgcaccggccgacgggcggccatgcgagccgctcgaaggctggccgcgggtattgtcactgtgccccccaggtccaggcgacgagcggccgccgcagcagccgcggccattagtgttatgactcagggtcgcaggggcaacgtgtactgggtgcgcgactcggttagcggcctgcgcgtgcccgtgcgcacccgccccccgcgcaactagattgcaataaaaaactacttagactcgtactgttgtatgtatccagcggcggcggcgcgcatcgaagctatgtccaagcgcaaaatcaaagaagagatgctccaggtcatcgcgccggagatctatggccccccgaagaaggaagagcaggattacaagccccgaaagctaaagcgggtcaaaaagaaaaagaaagatgatgatgatgatgaacttgacgacgaggtggaactgttgcacgcgaccgcgcccaggcgacgggtacagtggaaaggtcgacgcgtaagacgtgttttgcgacccggcaccaccgtagtctttacgcccggtgagcgctccacccgcacctacaagcgcgtgtatgatgaggtgtacggcgacgaggacctgcttgagcaggccaacgagcgcctcggggagtttgcctacggaaagcggcataaggacatgctggcgttgccgctggacgagggcaacccaacacctagcctaaagcccgtgacactgcagcaggtgctgcccgcgcttgcaccgtccgaagaaaagcgcggcctaaagcgcgagtctggtgacttggcacccaccgtgcagctgatggtacccaagcgtcagcgactggaagatgtcttggaaaaaatgaccgtggagcctgggctggagcccgaggtccgcgtgcggccaatcaagcaggtggcaccgggactgggcgtgcagaccgtggacgttcagatacccaccaccagtagcactagtattgccactgccacagagggcatggagacacaaacgtccccggttgcctcggcggtggcagatgccgcggtgcaggcggccgctgcggccgcgtccaagacctctacggaggtgcaaacggacccgtggatgtttcgtgtttcagccccccggcgtccgcgccgttcaaggaagtacggcgccgccagcgcgctactgcccgaatatgccctacatccttccatcgcgcctacccccggctatcgtggctacacctaccgccccagaagacgagcaactacccgacgccgaaccaccactggaacccgccgccgccgtcgccgtcgccagcccgtgctggccccgatttccgtgcgcagggtggctcgcgaaggaggcaggaccctggtgctgccaacagcgcgctaccaccccagcatcgtttaaaagccggtctttgtggttcttgcagatatggccctcacctgccgcctccgtttcccggtgccgggattccgaggaagaatgcaccgtaggaggggcatggccggccacggcctgacgggcggcatgcgtcgtgcgcaccaccggcggcggcgcgcgtcgcaccgtcgcatgcgcgccggtatcctgcccctccttattccactgatcgccgcggcgattggcgccgtgcccggaattgcatccgtggccttgcaggcgcagagacactgattaaaaacaagttacatgtggaaaaatcaaaataaaagtctggactctcacgctcgcttggtcctgtaactattttgtagaatggaagacatcaactttgcgtcactggccccgcgacacggctcgcgcccgttcatgggaaactggcaagatatcggcaccagcaatatgagcggtggcgccttcagctggggctcgctgtggagcggcattaaaaatttcggttccgccgttaagaactatggcagcaaagcctggaacagcagcacaggccagatgctgagggacaagttgaaagagcaaaatttccaacaaaaggtggtagatggcctggcctctggcattagcggggtggtggacctggccaaccaggcagtgcaaaataagattaacagtaagcttgatccccgccctcccgtagaggagcctccaccggccgtggagacagtgtctccagaggggcgtggcgaaaagcgtccgcgacccgacagggaagaaactctggtgacgcaaatagacgagcctccctcgtacgaggaggcactaaagcaaggcctgcccaccacccgtcccatcgcgcccatggctaccggagtgctgggccagcacacacccgtaacgctggacctgcctccccccgccgacacccagcagaaacctgtgctgccaggcccgtccgccgttgttgtaacccgtcctagccgcgggtccctgcgccgcgccgccagcggtccgcgatcgttgcggcccgtagccagtggcaactggcaaagcacactgaacagcatcgtgggtttgggggtgcaatccctgaagcgccgacgatgcttctgatagctaacgtgtcgtatgtgtgtcatgtatgcgtccatgtcgccgccagaggagctgctgagccgccgcgcgcccgctttccaagatggctaccccttcgatgatgccgcagtggtcttacatgcacatctcgggccaggacgcctcggagtacctgagccccgggctggtgcagttcgcccgcgccaccgagacgtacttcagcctgaataacaagtttagaaaccccacggtggcgcctacgcacgacgtgaccacagaccggtctcagcgtttgacgctgcggttcatccccgtggaccgcgaggatactgcgtactcgtacaaggcgcggttcaccctagctgtgggtgataaccgtgtgctagacatggcttccacgtactttgacatccgcggcgtgctggacaggggccctacttttaagccctactctggcactgcctacaacgcactggcccccaagggtgcccccaactcgtgcgagtgggaacaaaatgaaactgcacaagtggatgctcaagaacttgacgaagaggagaatgaagccaatgaagctcaggcgcgagaacaggaacaagctaagaaaacccatgtatatgcccaggctccactgtccggaataaaaataactaaagaaggtctacaaataggaactgccgacgccacagtagcaggtgccggcaaagaaattttcgcagacaaaacttttcaacctgaaccacaagtaggagaatctcaatggaacgaagcggatgccacagcagctggtggaagggttcttaaaaagacaactcccatgaaaccctgctatggctcatacgctagacccaccaattccaacggcggacagggcgttatggttgaacaaaatggtaaattggaaagtcaagtcgaaatgcaatttttttccacatccacaaatgccacaaatgaagttaacaatatacaaccaacagttgtattgtacagcgaagatgtaaacatggaaactccagatactcatctttcttataaacctaaaatgggggataaaaatgccaaagtcatgcttggacaacaagcaatgccaaacagaccaaattacattgcttttagagacaattttattggtctcatgtattacaacagcacaggtaacatgggtgtccttgctggtcaggcatcgcagttgaacgctgttgtagatttgcaagacagaaacacagagctgtcctaccagcttttgcttgattcaattggcgacagaacaagatacttttcaatgtggaatcaagctgttgacagctatgatccagatgtcagaattattgagaaccatggaactgaggatgagttgccaaattattgctttcctcttggtggaattgggattactgacacttttcaagctgttaaaacaactgctgctaacggggaccaaggcaatactacctggcaaaaagattcaacatttgcagaacgcaatgaaataggggtgggaaataactttgccatggaaattaacctgaatgccaacctatggagaaatttcctttactccaatattgcgctgtacctgccagacaagctaaaatacaaccccaccaatgtggaaatatctgacaaccccaacacctacgactacatgaacaagcgagtggtggctcctgggcttgtagactgctacattaaccttggggcgcgctggtctctggactacatggacaacgttaatccctttaaccacccccgccatgcgggcctgcgttaccgctccatgttgttgggaaacggccgctacgtgccctttcacattcaggtgccccaaaagttttttgccattaaaaacctcctcctcctgccaggctcatacacatatgaatggaacttcaggaaggatgttaacatggttctgcagagctctctgggaaacgaccttagagttgacggggctagcattaagtttgacagcatttgtctttacgccaccttcttccccatggcccacaacacggcctccacgctggaagccatgctcagaaatgacaccaacgaccagtcctttaatgactacctttccgccgccaacatgctatatcccatacccgccaacgccaccaacgtgcccatctccatcccatcgcgcaactgggcagcatttcgcggttgggccttcacacgcttgaagacaaaggaaaccccttccctgggatcaggctacgacccttactacacctactctggctccataccataccttgacggaaccttctatcttaatcacacctttaagaaggtggccattacttttgactcttctgttagctggccgggcaacgaccgcctgcttactcccaatgagtttgagattaagcgctcagttgacggggagggctataacgtagctcagtgcaacatgacaaaggactggttcctagtgcagatgttggccaactacaatattggctaccagggcttctacattccagaaagctacaaagaccgcatgtactcgttcttcagaaacttccagcccatgagccggcaagtggtggacgatactaaatacaaagattatcagcaggttggaattatccaccagcataacaactcaggcttcgtaggctacctcgctcccaccatgcgcgagggacaagcttaccccgctaatgttccctacccactaataggcaaaaccgcggttgatagtattacccagaaaaagtttctttgcgaccgcaccctgtggcgcatccccttctccagtaactttatgtccatgggtgcgctcacagacctgggccaaaaccttctctacgcaaactccgcccacgcgctagacatgacctttgaggtggatcccatggacgagcccacccttctttatgttttgtttgaagtctttgacgtggtccgtgtgcaccagccgcaccgcggcgtcatcgagaccgtgtacctgcgcacgcccttctcggccggcaacgccacaacataaagaagcaagcaacatcaacaacagctgccgccatgggctccagtgagcaggaactgaaagccattgtcaaagatcttggttgtgggccatattttttgggcacctatgacaagcgcttcccaggctttgtttccccacacaagctcgcctgcgccatagttaacacggccggtcgcgagactgggggcgtacactggatggcctttgcctggaacccgcgctcaaaaacatgctacctctttgagccctttggcttttctgaccaacgtctcaagcaggtttaccagtttgagtacgagtcactcctgcgccgtagcgccattgcctcttcccccgaccgctgtataacgctggaaaagtccacccaaagcgtgcaggggcccaactcggccgcctgtggcctattctgctgcatgtttctccacgcctttgccaactggccccaaactcccatggatcacaaccccaccatgaaccttattaccggggtacccaactccatgcttaacagtccccaggtacagcccaccctgcgccgcaaccaggaacagctctacagcttcctggagcgccactcgccctacttccgcagccacagtgcgcaaattaggagcgccacttctttttgtcacttgaaaaacatgtaaaaataatgtactaggagacactttcaataaaggcaaatgtttttatttgtacactctcgggtgattatttacccccacccttgccgtctgcgccgtttaaaaatcaaaggggttctgccgcgcatcgctatgcgccactggcagggacacgttgcgatactggtgtttagtgctccacttaaactcaggcacaaccatccgcggcagctcggtgaagttttcactccacaggctgcgcaccatcaccaacgcgtttagcaggtcgggcgccgatatcttgaagtcgcagttggggcctccgccctgcgcgcgcgagttgcgatacacagggttacagcactggaacactatcagcgccgggtggtgcacgctggccagcacgctcttgtcggagatcanatccgcgtccaggtcctccgcgttgctcagggcgaacggagtcaactttggtagctgccttcccaaaaagggtgcatgcccaggctttgagttgcactcgcaccgtagtggcatcagaaggtgaccgtgcccagtctgggcgttaggatacagcgcctgcatgaaagccttgatctgcttaaaagccacctgagcctttgcgccttcagagaagaacatgccgcaagacttgccggaaaactgattggccggacaggccgcgtcatgcacgcagcaccttgcgtcggtgttggagatctgcaccacatttcggccccaccggttcttcacgatcttggccttgctagactgctccttcagcgcgcgctgcccgttttcgctcgtcacatccatttcaatcacgtgctccttatttatcataatgctcccgtgtagacacttaagctcgccttcgatctcagcgcagcggtgcagccacaacgcgcagcccgtgggctcgtggtgcttgtaggttacctctgcaaacgactgcaggtacgcctgcaggaatcgccccatcatcgtcacaaaggtcttgttgctggtgaaggtcagctgcaacccgcggtgctcctcgtttagccaggtcttgcatacggccgccagagcttccacttggtcaggcagtagcttgaagtttgcctttagatcgttatccacgtggtacttgtccatcaacgcgcgcgcagcctccatgcccttctcccacgcagacacgatcggcaggctcagcgggtttatcaccgtgctttcactttccgcttcactggactcttccttttcctcttgcatccgcataccccgcgccactgggtcgtcttcattcagccgccgcaccgtgcgcttacctcccttgccgtgcttgattagcaccggtgggttgctgaaacccaccatttgtagcgccacatcttctctttcttcctcgctgtccacgatcacctctggggatggcgggcgctcgggcttgggagaggggcgcttctttttctttttggacgcaatggccaaatccgccgtcgaggtcgatggccgcgggctgggtgtgcgcggcaccagcgcatcttgtgacgagtcttcttcgtcctcggactcgagacgccgcctcagccgcttttttgggggcgcgcggggaggcggcggcgacggcgacggggacgagacgtcctccatggttggtggacgtcgcgccgcaccgcgtccgcgctcgggggtggtttcgcgctgctcctcttcccgactggccatttccttctcctataggcagaaaaagatcatggagtcagtcgagaaggaggacagcctaaccgccccctttgagttcgccaccaccgcctccaccgatgccgccaacgcgcctaccaccttccccgtcgaggcacccccgcttgaggaggaggaagtgattatcgagcaggacccaggttttgtaagcgaagacgacgaagatcgctcagtaccaacagaggataaaaagcaagaccaggacgacgcagaggcaaacgaggaacaagtcgggcggggggaccaaaggcatggcgactacctagatgtgggagacgacgtgctgttgaagcatctgcagcgccagtgcgccattatctgcgacgcgttgcaagagcgcagcgatgtgcccctcgccatagcggatgtcagccttgcctacgaacgccacctgttctcaccgcgcgtaccccccaaacgccaagaaaacggcacatgcgagcccaacccgcgcctcaacttctaccccgtatttgccgtgccagaggtgcttgccacctatcacatctttttccaaaactgcaagatacccctatcctgccgtgccaaccgcagccgagcggacaagcagctggccttgcggcagggcgctgtcatacctgatatcgcctcgctcgacgaagtgccaaaaatctttgagggtcttggacgcgacgagaagcgcgcggcaaacgctctgcaacaagaaaacagcgaaaatgaaagtcactgtggagtgctggtggaacttgagggtgacaacgcgcgcctagccgtgctgaaacgcagcatcgaggtcacccactttgcctacccggcacttaacctaccccccaaggttatgagcacagtcatgagcgagctgatcgtgcgccgtgcacgacccctggagagggatgcaaacttgcaagaacaaaccgaggagggcctacccgcagttggcgatgagcagctggcgcgctggcttgagacgcgcgagcctgccgacttggaggagcgacgcaagctaatgatggccgcagtgcttgttaccgtggagcttgagtgcatgcagcggttctttgctgacccggagatgcagcgcaagctagaggaaacgttgcactacacctttcgccagggctacgtgcgccaggcctgcaaaatttccaacgtggagctctgcaacctggtctcctaccttggaattttgcacgaaaaccgccttgggcaaaacgtgcttcattccacgctcaagggcgaggcgcgccgcgactacgtccgcgactgcgtttacttatttctgtgctacacctggcaaacggccatgggcgtgtggcagcagtgcctggaggagcgcaacctgaaggagctgcagaagctgctaaagcaaaacttgaaggacctatggacggccttcaacgagcgctccgtggccgcgcacctggcggacattatcttccccgaacgcctgcttaaaaccctgcaacagggtctgccagacttcaccagtcaaagcatgttgcaaaactttaggaactttatcctagagcgttcaggaattctgcccgccacctgctgtgcgcttcctagcgactttgtgcccattaagtaccgtgaatgccctccgccgctttggggtcactgctaccttntgcagctagccaactaccttgcctaccactccgacatcatggaagacgtgagcggtgacggcctactggagtgtcactgtcgctgcaacctatgcaccccgcaccgctccctggtctgcaattcacaactgcttagcgaaagtcaaattatcggtacctttgagctgcagggtccctcgcctgacgaaaagtccgcggctccggggttgaaactcactccggggctgtggacgtcggcttaccttcgcaaatttgtacctgaggactaccacgcccacgagattaggttctacgaagaccaatcccgcccgccaaatgcggagcttaccgcctgcgtcattacccagggccacatccttggccaattgcaagccattaacaaagcccgccaagagtttctgctacgaaagggacggggggtttacttggacccccagtccggcgaggagctcaacccaatccccccgccgccgcagccctatcagcagccgcgggcccttgcttcccaggatggcacccaaaaagaagctgcagctgccgccgccgccacccacggacgaggaggaatactgggacagtcaggcagaggaggttttggacgaggaggaggagatgatggaagactgggacagcctagacgaggaagcttccgaggccgaagaggtgtcagacgaaacaccgtcaccctcggtcgcattcccctcgccggcgccccagaaatcggcaaccgttcccagcattgctacaacctccgctcctcaggcgccgccggcactgcccgttcgccgacccaaccgtagatgggacaccactggaaccagggccggtaagtctaagcagccgccgccgttagcccaagagcaacaacagcgccaaggctaccgctcgtggcgcgtgcacaagaacgccatagttgcttgcttgcaagactgtgggggcaacatctccttcgcccgccgctttcttctctaccatcacggcgtggccttcccccgtaacatcctgcattactaccgtcatctctacagcccctactgcaccggcggcagcggcagcaacagcagcggccacgcagaagcaaaggcgaccggatagcaagactctgacaaagcccaagaaatccacagcggcggcagcagcaggaggaggagcactgcgtctggcgcccaacgaacccgtatcgacccgcgagcttagaaacaggatttttcccactctgtatgctatatttcaacagagcaggggccaagaacaagagctgaaaataaaaaacaggtctctgcgctccctcacccgcagctgcctgtatcacaaaagcgaagatcagcttcggcgcacgctggaagacgcggaggctctcttcagcaaatactgcgcgctgactcttaaggactagtttcgcgccctttctcaaatttaagcgcgaaaactacgtcatctccagcggccacacccggcgccagcacctgtcgtcagcgccattatgagcaaggaaattcccacgccctacatgtggagttaccagccacaaatgggacttgcggctggagctgcccaagactactcaacccgaataaactacatgagcgcgggaccccacatgatatcccgggtcaacggaatccgcgcccaccgaaaccgaattctcctcgaacaggcggctattaccaccacacctcgtaataaccttaatccccgtagttggcccgctgccctggtgtaccaggaaagtcccgctcccaccactgtggtacttcccagagacgcccaggccgaagttcagatgactaactcaggggcgcagcttgcgggcggctttcgtcacagggtgcggtcgcccgggcagggtataactcacctgaaaatcagagggcgaggtattcagctcaacgacgagtcggtgagctcctctcttggtctccgtccggacgggacatttcagatcggcggcgcgtggccgctcttcatttacgccccgtcaggcgatcctaactctgcagacctcgtcctcggagccgcgctccggaggcattggaactctacaatttattgaggagttcgtgccttcggtttacttcaaccccttttctggacctcccggccactacccggaccagtttattcccaactttgacgcggtaaaagactcggcggacggctacgactgaatgaccagtggagaggcagagcaactgcgcctgacacacctcgaccactgccgccgccacaagtgctttgcccgcggctccggtgagttttgttactttgaattgcccgaagagcatatcgagggcccggcgcacggcgtccggctcaccacccaggtagggataacagggtaattgagacatgattcctcgagtccttatattattgacccttgttgcgcttttctgtgcgtgctctacattggctgcggtcgctcacatcgaagtagattgcatcccacctttcacagtttacctgctttacggatttgtcacccttatcctcatctgcagcctcgtcactgtagtcatcgccttcattcagttcattgactggatttgtgtgcgcattgcgtaccttaggcaccatccgcaatacagagacaggactatagctgatcttctcagaattctttaattatgaaacggattgtcacttttgttttgctgattttctgcgccctacctgtgctttgctcccaaacctcagcgcctcccaaaagacatatttcctgcagattcactcaaatatggaacattcccagctgctacaacaaacagagcgatttgtcagaagcctggttatacgccatcatctctgtcatggttttttgcagtaccatttttgccctagccatatacccataccttgacattggttggaatgccatagatgccatgaaccaccctactttcccagcgcccaatgtcataccactgcaacaggttattgccccaatcaatcagcctcgccccccttctcccacccccactgagattagctactttaatttgacaggtggagatgactgaatctctagatctagaattggatggaattaacaccgaacagcgcctactagaaaggcgcaaggcggcgtccgagcgagaacgcctaaaacaagaagttgaagacatggttaacctgcaccagtgtaaaagaggtatcttttgtgtggtcaagcaggccaaacttacctacgaaaaaaccactaccggcaaccgccttagctacaagctacccacccagcgccaaaaactggtgcttatggtgggagaaaaacctatcaccgtcacccagcactcggcagaaacagaaggctgcctgcacttcccctatcagggtccagaggacctctgcactcttattaaaaccatgtgtggcattagagatcttattccattcaactaacaataaacacacaataaattacttacttaaaatcagtcagcaaatctttgtccagcttattcagcatcacctcctttccctcctcccaactctggtatttcagcagccttttagctgcgaactttctccaaagtctaaatgggatgtcaaattcctcatgttcttgtccctccgcacccactatcttcatattgttgcagatgaaacgcgccagaccgtctgaagacaccttcaaccctgtgtacccatatgacacggaaaccggccctccaactgtgcctttccttacccctccctttgtgtcgccaaatgggttccaagaaagtccccccggagtgctttctttgcgtctttcagaacctttggttacctcacacggcatgcttgcgctaaaaatgggcagcggcctgtccctggatcaggcaggcaaccttacatcaaatacaatcactgtttctcaaccgctaaaaaaaacaaagtccaatataactttggaaacatccgcgccccttacagtcagctcaggcgccctaaccatggccacaacttcgcctttggtggtctctgacaacactcttaccatgcaatcacaagcaccgctaaccgtgcaagactcaaaacttagcattgctaccaaagagccacttacagtgttagatggaaaactggccctgcagacatcagcccccctctctgccactgataacaacgccctcactatcactgcctcacctcctcttactactgcaaatggtagtctggctgttaccatggaaaacccactttacaacaacaatggaaaacttgggctcaaaattggcggtcctttgcaagtggccaccgactcacatgcactaacactaggtactggtcagggggttgcagttcataacaatttgctacatacaaaagttacaggcgcaatagggtttgatacatctggcaacatggaacttaaaactggagatggcctctatgtggatagcgccggtcctaaccaaaaactacatattaatctaaataccacaaaaggccttgcttttgacaacaccgcaataacaattaacgctggaaaagggttggaatttgaaacagactcctcaaacggaaatcccataaaaacaaaaattggatcaggcatacaatataataccaatggagctatggttgcaaaacttggaacaggcctcagttttgacagctccggagccataacaatgggcagcataaacaatgacagacttactctttggacaacaccagacccatccccaaattgcagaattgcttcagataaagactgcaagctaactctggcgctaacaaaatgtggcagtcaaattttgggcactgtttcagctttggcagtatcaggtaatatggcctccatcaatggaactctaagcagtgtaaacttggttcttagatttgatgacaacggagtgcttatgtcaaattcatcactggacaaacagtattggaactttagaaacggggactccactaacggtcaaccatacacttatgctgttgggtttatgccaaacctaaaagcttacccaaaaactcaaagtaaaactgcaaaaagtaatattgttagccaggtgtatcttaatggtgacaagtctaaaccattgcattttactattacgctaaatggaacagatgaaaccaaccaagtaagcaaatactcaatatcattcagttggtcctggaacagtggacaatacactaatgacaaatttgccaccaattcctataccttctcctacattgcccaggaataaagaatcgtgaacctgttgcatgttatgtttcaacgtgtttatttttcaattcgtattagtcatcgctattaccatggtgatgcggttttggcagtacatcaatgggcgtggatagcggtttgactcacggggatttccaagtctccaccccattgacgtcaatgggagtttgttttggcaccaaaatcaacgggactttccaaaatgtcgtaacaactccgccccattgacgcaaatgggcggtaggcgtgtacggtgggaggtctatataagcagagctggtttagtgaaccgtcagatccgctagagatccaccatgtttgtctttctcgtgctgctgcccctcgtgagcagccagtgcgtcaatctgacaacaaggacccagctgccccccgcctacaccaactccttcacaagaggcgtgtattaccccgataaggtcttcagatccagcgtcctccacagcacccaagatttgtttctgcctttcttcagcaacgtgacatggttccacgccattcatgtcagcggcacaaacggcacaaagaggtttgacaaccccgtgctccccttcaacgacggcgtgtacttcgccagcacagagaaatccaatatcattaggggctggatcttcggcacaacactggattccaagacccagtctctgctcattgtgaataacgccaccaacgtggtgattaaggtctgtgagtttcagttctgcaacgacccctttctgggagtctactaccacaagaataataagagctggatggagtccgagtttagggtgtacagctccgccaacaactgtaccttcgaatacgtgtcccagcctttcctcatggatctggagggcaagcaaggcaatttcaaaaatctgagagagttcgtgttcaaaaacattgatggatacttcaaaatctacagcaagcatacccccattaatctggtgagggatctgccccaaggattctccgctctggaacctctggtggatctgcccattggcattaacatcacaagattccagaccctcctcgccctccatagatcctatctgacccccggcgactcctccagcggatggacagccggagctgccgcctactacgtgggctatctgcagccaagaacctttctgctgaagtacaacgagaacggcaccatcacagacgctgtcgattgcgctctcgaccctctgagcgagaccaaatgcacactgaagagcttcaccgtggaaaagggcatctatcagaccagcaacttcagagtgcagcctaccgagagcattgtgaggtttcccaacatcaccaatctgtgtcctttcggcgaggtctttaatgccacaaggttcgcttccgtgtatgcttggaataggaagaggatcagcaattgcgtcgccgactattccgtcctctataacagcgcctccttctccaccttcaaatgttatggcgtgtcccccaccaagctcaacgacctctgcttcaccaatgtgtacgctgactccttcgtcattaggggcgacgaggtgaggcaaattgcccccggccagaccggcaagattgctgattacaactacaaactgcccgacgattttaccggctgcgtgatcgcttggaactccaacaatctggactccaaagtgggcggaaactacaattacctctacagactctttagaaaaagcaatctgaagcccttcgagagagacatctccaccgaaatctaccaagccggaagcacaccttgcaatggcgtcgagggatttaactgctacttccctctgcagagctacggctttcaacctaccaacggcgtcggatatcaaccctatagggtggtcgtgctgagctttgaactgctgcatgctcccgccaccgtctgcggacctaagaagagcaccaatctcgtcaaaaacaagtgcgtgaacttcaacttcaatggactgaccggcaccggcgtgctgaccgagagcaataagaagtttctgcccttccagcagttcggaagggatattgccgataccacagatgctgtgagggacccccaaaccctcgagattctggatatcaccccttgcagcttcggaggagtgtccgtgatcacccccggaacaaacacctccaatcaagtggctgtgctgtaccaagacgtgaactgcacagaagtccccgtggccatccatgccgaccagctgacccctacatggagagtgtactccaccggcagcaatgtgttccagacaagagccggatgcctcattggagctgaacacgtcaacaacagctacgagtgcgacattcccatcggcgccggcatttgtgcctcctatcagacccagaccaacagcccaagaagggctagaagcgtcgcttcccaatccatcattgcctacaccatgtctctgggagccgaaaactccgtcgcctactccaacaatagcatcgccatccccaccaattttaccatctccgtgaccacagagattctgcccgtgtccatgacaaagacatccgtggactgcaccatgtacatctgtggcgacagcaccgagtgtagcaatctgctgctgcaatatggcagcttctgcacccagctgaacagagccctcaccggcatcgccgtcgaacaagacaagaacacccaagaggtgttcgcccaagtgaagcaaatctacaagaccccccctatcaaagatttcggaggattcaactttagccagattctgcccgatcctagcaagccttccaagaggagcttcatcgaggatctgctgtttaataaggtgacactggccgacgctggcttcattaaacagtacggcgattgtctgggcgacatcgctgctagggatctgatctgcgctcagaagttcaacggactgacagtcctccctcctctgctgaccgacgagatgatcgctcagtataccagcgctctgctggctggaaccattaccagcggctggacattcggcgctggagccgccctccaaattccctttgccatgcagatggcctatagattcaacggcattggcgtcacccaaaatgtgctgtatgaaaatcagaagctgattgctaaccaattcaatagcgccattggcaagatccaagactctctgagctccacagccagcgccctcggaaagctgcaagacgtggtgaatcaaaacgcccaagctctgaacacactggtgaaacagctcagcagcaactttggagccatcagcagcgtgctcaatgatatcctctctaggctggacaaagtggaggccgaagtccagatcgatagactcatcaccggcagactccaatctctgcagacatacgtcacccaacagctcattagagctgccgaaatcagagcctccgccaatctggccgccaccaagatgtccgagtgcgtgctgggacagagcaagagagtggacttctgtggcaagggataccatctgatgagcttcccccagagcgctccccatggagtggtctttctgcatgtcacatacgtgcccgcccaagagaagaacttcaccaccgctcccgccatttgccacgatggaaaggcccactttcccagagaaggagtgttcgtgagcaacggcacacactggtttgtcacccagagaaatttttacgagccccagattatcaccaccgacaacaccttcgtgtccggaaactgcgatgtcgtgattggcatcgtgaacaacacagtctacgaccctctgcagcccgaactcgacagcttcaaggaagagctggacaagtacttcaagaatcacacatcccccgacgtggatctgggcgacattagcggcattaatgcctccgtcgtcaacattcagaaggagattgatagactgaatgaagtcgccaagaacctcaatgagtctctgattgatctgcaagagctgggcaagtacgagcaatacatcaaatggccttggtacatctggctgggattcatcgctggactcatcgccatcgtgatggtcaccattatgctgtgttgcatgaccagctgctgcagctgtctgaagggctgctgcagctgcggaagctgctgcaagtttgacgaagacgactccgagcccgtgctgaagggcgtcaagctgcattatacataaactagtgctggaattcgcccttatagagtgctggaattcgcccttatagagtgctggaattcgcccttatatctagtaacggccgccagtgtgctggaattcgcccttataacttcgtatagcatacattatacgaagttataagggcgaattctgcagatatccatcctttaaaaaacctcccacacctccccctgaacctgaaacataaaatgaatgcaattgttgttgttaacttgtttattgcagcttataatggttacaaataaagcaatagcatcacaaatttcacaaataaagcatttttttcactgcattctagttgtggtttgtccaaactcatcaatgtatcttaacaacgtgtttatttttcaattgcagaaagaattgcagaaaatttcaagtcatttttcattcagtagtatagccccaccaccacatagcttatactaatcaccgtaccttaatcaaactcacagaaccctagtattcaacctgccacctccctcccaacacacagagtacacagtcctttctccccggctggccttaaacagcatcatatcatgggtaacagacatattcttaggtgttatattccacacggtctcctgtcgagccaaacgctcatcagtgatgttaataaactccccgggcagctcgcttaagttcatgtcgctgtccagctgctgagccacaggctgctgtccaacttgcggttgctcaacgggcggcgaaggagaagtccacgcctacatgggggtagagtcataatcgtgcatcaggatagggcggtggtgctgcagcagcgcgcgaataaactgctgccgccgccgctccgtcctgcaggaatacaacatggcagtggtctcctcagcgatgattcgcaccgcccgcagcataaggcgccttgtcctccgggcacagcagcgcaccctgatctcacttaagtcagcacagtaactgcagcacagtaccacaatattgtttaaaatcccacagtgcaaggcgctgtatccaaagctcatggcggggaccacagaacccacgtggccatcataccacaagcgcaggtagattaagtggcgacccctcataaacacgctggacataaacattacctcttttggcatgttgtaattcaccacctcccggtaccatataaacctctgattaaacatggcgccatccaccaccatcctaaaccagctggccaaaacctgcccgccggctatgcactgcagggaaccgggactggaacaatgacagtggagagcccaggactcgtaaccatggatcatcatgctcgtcatgatatcaatgttggcacaacacaggcacacgtgcatacacttcctcaggattacaagctcctcccgcgtcagaaccatatcccagggaacaacccattcctgaatcagcgtaaatcccacactgcagggaagacctcgcacgtaactcacgttgtgcattgtcaaagtgttacattcgggcagcagcggatgatcctccagtatggtagcgcgtgtctctgtctcaaaaggaggtaggcgatccctactgtacggagtgcgccgagacaaccgagatcgtgttggtcgtagtgtcatgccaaatggaacgccggacgtagtcatatttcctgaagcaaaaccaggtgcgggcgtgacaaacagatctgcgtctccggtctcgtcgcttagctcgctctgtgtagtagttgtagtatatccactctctcaaagcatccaggcgccccctggcttcgggttctatgtaaactccttcatgcgccgctgccctgataacatccaccaccgcagaataagccacacccagccaacctacacattcgttctgcgagtcacacacgggaggagcgggaagagctggaagaaccatgttttttttttttattccaaaagattatccaaaacctcaaaatgaagatctattaagtgaacgcgctcccctccggtggcgtggtcaaactctacagccaaagaacagataatggcatttgtaagatgttgcacaatggcttccaaaaggcaaactgccctcacgtccaagtggacgtaaaggctaaacccttcanggtgaatctcctctataaacattccagcaccttcaaccatgcccaaataattttcatctcgccaccttatcaatatgtctctaagcaaatcccgaatattaagtccggccattgtaaaaatctgctccagagcgccctccaccttcagcctcaagcagcgaatcatgattgcaaaaattcaggttcctcacagacctgtataagattcaaaagcggaacattaacaaaaataccgcgatcccgtaggtcccttcgcagggccagctgaacataatcgtgcaggtctgcacggaccagcgcggccacttccccgccaggaaccatgacaaaagaacccacactgattatgacacgcatactcggagctatgctaaccagcgtagccccgatgtaagcttgttgcatgggcggcgatataaaatgcaaggtactgctcaaaaaatcaggcaaagcctcgcgcaaaaaagcaagcacatcgtagtcatgctcatgcagataaaggcaggtaagttccggaaccaccacagaaaaagacaccatttttctctcaaacatgtctgcgggttcctgcataaacacaaaataaaataacaaaaaaaaaaaaacatttaaacattagaagcctgtcttacaacaggaaaaacaacccttataagcataagacggactacggccatgccggcgtgaccgtaaaaaaactggtcaccgtgattaaaaagcaccaccgacagttcctcggtcatgtccggagtcataatgtaagactcggtaaacacatcaggttggttaacatcggtcagtgctaaaaagcgaccgaaatagcccgggggaatacatacccgcaggcgtagagacaacattacagcccccataggaggtataacaaaattaataggagagaaaaacacataaacccctgaaaaaccctcctgcccctaggcaaaatagcaccctcccgctccagaacaacatacagcgcttccacagcggcagccataacagtcagccttaccagtaaaaaaacctattaaaaaacaccactcgacacggcaccagctcaatcagtcacagtgtaaaaagggccaagtacagagcgagtatatataggactaaaaaatgacgtaacggttaaagtccacaaaaaccacccagaaaaccgcacgcgaacctacgcccagaaacgaaagccaaaaaacccacaacttcctcaaatcttcacttccgttttcccacgatacgtcacttcccattttaaaaaaaaactacaattcccaatacatgcaagttactccgccctaaaacctacgtcacccgccccgttcccacgccccgcgccacgtcacaaactccaccccctcattatcatattggcttcaatccaaaataaggtatattattgatgatggcgat

SEQ ID NO: 31 - DNA, 36859 bp, Artificial
  nucleic acid sequence of SC-Ad6-(delta)III-(delta)E3ADP-I-CMV-Spike-PP-3X-L
  misc_feature (7190)..(7190): n is a, c, g, or t
  misc_feature (21091)..(21091): n is a, c, g, or t
  misc_feature (24027)..(24027): n is a, c, g, or t
  misc_feature (35449)..(35449): n is a, c, g, or t
cgccatcatcaataatataccttattttggattgaagccaatatgataatgagggggtggagtttgtgacgtggcgcggggcgtgggaacggggcgggtgacgtagtagtgtggcggaagtgtgatgttgtaagtgtggcggaacacatgtaagcgccggatgtggtaaaagtgacgtttttggtgtgcgccggtgtacacgggaagtgacaattttcgcgcggttttaggcggatgttgtagtaaatttgggcgtaaccaagtaatatttggccattttcgcgggaaaactgaataagaggaagtgaaatctgaataattctgtgttactcatagcgcgtaatatttgtctagggccgcggggactttgaccgtttacgtggagactcgcccaggtgtttttctcaggtgttttccgcgttccgggtcaaagttggcgttttattattatagtcagctgacgcgcagtgtatttatacccggtgagttcctcaagaggccactcttgagtgccagcgagtagagttttctcctccgagccgctccgacaccgggactgaaaatgagacatattatctgccacggaggtgttattaccgaagaaatggccgccagtcttttggaccagctgatcgaagaggtactggctgataatcttccacctcctagccattttgaaccacctacccttcacgaactgtatgatttagacgtgacggcccccgaagatcccaacgaggaggcggtttcgcagatttttcccgagtctgtaatgttggcggtgcaggaagggattgacttattcacttttccgccggcgcccggttctccggagccgcctcacctttcccggcagcccgagcagccggagcagagagccttgggtccggtttctatgccaaaccttgtgccggaggtgatcgatcttacctgccacgaggctggctttccacccagtgacgacgaggatgaagagggtgaggagtttgtgttagattatgtggagcaccccgggcacggttgcaggtcttgtcattatcaccggaggaatacgggggacccagatattatgtgttcgctttgctatatgaggacctgtggcatgtttgtctacagtaagtgaaaaattatgggcagtgggtgatagagtggtgggtttggtgtggtaattttttttttaatttttacagttttgtggtttaaagaattttgtattgtgattttttaaaaggtcctgtgtctgaacctgagcctgagcccgagccagaaccggagcctgcaagacctacccggcgtcctaaattggtgcctgctatcctgagacgcccgacatcacctgtgtctagagaatgcaatagtagtacggatagctgtgactccggtccttctaacacacctcctgagatacacccggtggtcccgctgtgccccattaaaccagttgccgtgagagttggtgggcgtcgccaggctgtggaatgtatcgaggacttgcttaacgagtctgggcaacctttggacttgagctgtaaacgccccaggccataaggtgtaaacctgtgattgcgtgtgtggttaacgcctttgtttgctgaatgagttgatgtaagtttaataaagggtgagataatgtttaacttgcatggcgtgttaaatggggcggggcttaaagggtatataatgcgccgtgggctaatcttggttacatctgacctcatggaggcttgggagtgtttggaagatttttctgctgtgcgtaacttgctggaacagagctctaacagtacctcttggttttggaggtttctgtggggctcctcccaggcaaagttagtctgcagaattaaggaggattacaagtgggaatttgaagagcttttgaaatcctgtggtgagctgtttgattctttgaatctgggtcaccaggcgcttttccaagagaaggtcatcaagactttggatttttccacaccggggcgcgctgcggctgctgttgcttttttgagttttataaaggataaatggagcgaagaaacccatctgagcggggggtacctgctggattttctggccatgcatctgtggagagcggtggtgagacacaagaatcgcctgctactgttgtcttccgtccgcccggcaataataccgacggaggagcaacagcaggaggaagccaggcggcggcggcggcaggagcagagcccatggaacccgagagccggcctggaccctcgggaatgaatgttgtacaggtggctgaactgtttccagaactgagacgcattttaaccattaacgaggatgggcaggggctaaagggggtaaagagggagcggggggcttctgaggctacagaggaggctaggaatctaacttttagcttaatgaccagacaccgtcctgagtgtgttacttttcagcagattaaggataattgcgctaatgagcttgatctgctggcgcagaagtattccataaagcagctgaccacttactggctgcagccaggggatgattttgaggaggctattagggtatatgcaaaggtggcacttaggccagattgcaagtacaagattagcaaacttgtaaatatcaggaattgttgctacatttctgggaacggggccgaggtggagatagatacggaggatagggtggcctttagatgtagcatgataaatatgtggccgggggtgcttggcatggacggggtggttattatgaatgtgaggtttactggtcccaattttagcggtacggttttcctggccaataccaatcttatcctacacggtgtaagcttctatgggtttaacaatacctgtgtggaagcctggaccgatgtaagggttcggggctgtgccttttactgctgctggaagggggtggtgtgtcgccccaaaagcagggcttcaattaagaaatgcctgtttgaaaggtgtaccttgggtatcctgtctgagggtaactccagggtgcgccacaatgtggcctccgactgtggttgctttatgctagtgaaaagcgtggctgtgattaagcataacatggtgtgtggcaactgcgaggacagggcctctcagatgctgacctgctcggacggcaactgtcacttgctgaagaccattcacgtagccagccactctcgcaaggcctggccagtgtttgagcacaacatactgacccgctgttccttgcatttgggtaacaggaggggggtgttcctaccttaccaatgcaatttgagtcacactaagatattgcttgagcccgagagcatgtccaaggtgaacctgaacggggtgtttgacatgaccatgaagatctggaaggtgctgaggtacgatgagacccgcaccaggtgcagaccctgcgagtgtggcggtaaacatattaggaaccagcctgtgatgctggatgtgaccgaggagctgaggcccgatcacttggtgctggcctgcacccgcgctgagtttggctctagcgatgaagatacagattgaggtactgaaatgtgtgggcgtggcttaagggtgggaaagaatatataaggtgggggtctcatgtagttttgtatctgttttgcagcagccgccgccatgagcgccaactcgtttgatggaagcattgtgagctcatatttgacaacgcgcatgcccccatgggccggggtgcgtcagaatgtgatgggctccagcattgatggtcgccccgtcctgcccgcaaactctactaccttgacctacgagaccgtgtctggaacgccgttggagactgcagcctccgccgccgcttcagccgctgcagccaccgcccgcgggattgtgactgactttgctttcctgagcccgcttgcaagcagtgcagcttcccgttcatccgcccgcgatgacaagttgacggctcttttggcacaattggattctttgacccgggaacttaatgtcgtttctcagcagctgttggatctgcgccagcaggtttctgccctgaaggcttcctcccctcccaatgcggtttaaaacataaataaaaaccagactctgtttggatttggatcaagcaagtgtcttgctgtctttatttaggggttttgcgcgcgcggtaggcccgggaccagcggtctcggtcgttgagggtcctgtgtattttttccaggacgtggtaaaggtgactctggatgttcagatacatgggcataagcccgtctctggggtggaggtagcaccactgcagagcttcatgctgcggggtggtgttgtagatgatccagtcgtagcaggagcgctgggcgtggtgcctaaaaatgtctttcagtagcaagctgattgccaggggcaggcccttggtgtaagtgtttacaaagcggttaagctgggatgggtgcatacgtggggatatgagatgcatcttggactgtatttttaggttggctatgttcccagccatatccctccggggattcatgttgtgcagaaccaccagcacagtgtatccggtgcacttgggaaatttgtcatgtagcttagaaggaaatgcgtggaagaacttggagacgcccttgtgacctccaagattttccatgcattcgtccataatgatggcaatgggcccacgggcggcggcctgggcgaagatatttctgggatcactaacgtcatagttgtgttccaggatgagatcgtcataggccatttttacaaagcgcgggcggagggtgccagactgcggtataatggttccatccggcccaggggcgtagttaccctcacagatttgcatttcccacgctttgagttcagatggggggatcatgtctacctgcggggcgatgaagaaaaccgtttccggggtaggggagatcagctgggaagaaagcaggttcctaagcagctgcgacttaccgcagccggtgggcccgtaaatcacacctattaccggctgcaactggtagttaagagagctgcagctgccgtcatccctgagcaggggggccacttcgttaagcatgtccctgacttgcatgttttccctgaccaaatccgccagaaggcgctcgccgcccagcgatagcagttcttgcaaggaagcaaagtttttcaacggtttgaggccgtccgccgtaggcatgcttttgagcgtttgaccaagcagttccaggcggtcccacagctcggtcacgtgctctacggcatctcgatccagcatatctcctcgtttcgcgggttggggcggctttcgctgtacggcagtagtcggtgctcgtccagacgggccagggtcatgtctttccacgggcgcagggtcctcgtcagcgtagtctgggtcacggtgaaggggtgcgctccgggttgcgcgctggccagggtgcgcttgaggctggtcctgctggtgctgaagcgctgccggtcttcgccctgcgcgtcggccaggtagcatttgaccatggtgtcatagtccagcccctccgcggcgtggcccttggcgcgcagcttgcccttggaggaggcgccgcacgaggggcagtgcagacttttaagggcgtagagcttgggcgcgagaaataccgattccggggagtaggcatccgcgccgcaggccccgcagacggtctcgcattccacgagccaggtgagctctggccgttcggggtcaaaaaccaggtttcccccatgctttttgatgcgtttcttacctctggtttccatgagccggtgtccacgctcggtgacgaaaaggctgtccgtgtccccgtatacagacttgagaggcctgtcctcgagcggtgttccgcggtcctcctcgtatagaaactcggaccactctgagacgaaggctcgcgtccaggccagcacgaaggaggctaagtgggaggggtagcggtcgttgtccactagggggtccactcgctccagggtgtgaagacacatgtcgccctcttcggcatcaaggaaggtgattggtttataggtgtaggccacgtgaccgggtgttcctgaaggggggctataaaagggggtgggggcgcgttcgtcctcactctcttccgcatcgctgtctgcgagggccagctgttggggtgagtactccctctcaaaagcgggcatgacttctgcgctaagattgtcagtttccaaaaacgaggaggatttgatattcacctggcccgcggtgatgcctttgagggtggccgcgtccatctggtcagaaaagacaatctttttgttgtcaagcttggtggcaaacgacccgtagagggcgttggacagcaacttggcgatggagcgcagggtttggtttttgtcgcgatcggcgcgctccttggccgcgatgtttagctgcacgtattcgcgcgcaacgcaccgccattcgggaaagacggtggtgcgctcgtcgggcactaggtgcacgcgccaaccgcggttgtgcagggtgacaaggtcaacgctggtggctacctctccgcgtaggcgctcgttggtccagcagaggcggccgcccttgcgcgagcagaatggcggtagtgggtctagctgcgtctcgtccggggggtctgcgtccacggtaaagaccccgggcagcaggcgcgcgtcgaagtagtctatcttgcatccttgcaagtctagcgcctgctgccatgcgcgggcggcaagcgcgcgctcgtatgggttgagtgggggaccccatggcatggggtgggtgagcgcggaggcgtacatgccgcaaatgtcgtaaacgtagaggggctctctgagtattccaagatatgtagggtagcatcttccaccgcggatgctggcgcgcacgtaatcgtatagttcgtgcgagggagcgaggaggtcgggaccgaggttgctacgggcgggctgctctgctcggaagactatctgcctgaagatggcatgtgagttggatgatatggttggacgctggaagacgttgaagctggcgtctgtgagacctaccgcgtcacgcacgaaggaggcgtaggagtcgcgcagcttgttgaccagctcggcggtgacctgcacgtctagggcgcagtagtccagggtttccttgatgatgtcatacttatcctgtcccttttttttccacagctcgcggttgaggacaaactcttcgcggtctttccagtactcttggatcggaaacccgtcggcctccgaacggtaagagcctancatgtagaactggttgacggcctggtaggcgcagcatcccttttctacgggtagcgcgtatgcctgcgcggccttccggagcgaggtgtgggtgagcgcaaaggtgtccctaaccatgactttgaggtactggtatttgaagtcagtgtcgtcgcatccgccctgctcccagagcaaaaagtccgtgcgctttttggaacgcgggtttggcagggcgaaggtgacatcgttgaagagtatctttcccgcgcgaggcataaagttgcgtgtgatgcggaagggtcccggcacctcggaacggttgttaattacctgggcggcgagcacgatctcgtcaaagccgttgatgttgtggcccacaatgtaaagttccaagaagcgcgggatgcccttgatggaaggcaattttttaagttcctcgtaggtgagctcttcaggggagctgagcccgtgctctgaaagggcccagtctgcaagatgagggttggaagcgacgaatgagctccacaggtcacgggccattagcatttgcaggtggtcgcgaaaggtcctaaactggcgacctatggccattttttctggggtgatgcagtagaaggtaagcgggtcttgttcccagcggtcccatccaaggtccgcggctaggtctcgcgcggcggtcactagaggctcatctccgccgaacttcatgaccagcatgaagggcacgagctgcttcccaaaggcccccatccaagtataggtctctacatcgtaggtgacaaagagacgctcggtgcgaggatgcgagccgatcgggaagaactggatctcccgccaccagttggaggagtggctgttgatgtggtgaaagtagaagtccctgcgacgggccgaacactcgtgctggcttttgtaaaaacgtgcgcagtactggcagcggtgcacgggctgtacatcctgcacgaggttgacctgacgaccgcgcacaaggaagcagagtgggaatttgagcccctcgcctggcgggtttggctggtggtcttctacttcggctgcttgtccttgaccgtctggctgctcgaggggagttacggtggatcggaccaccacgccgcgcgagcccaaagtccagatgtccgcgcgcggcggtcggagcttgatgacaacatcgcgcagatgggagctgtccatggtctggagctcccgcggcgtcaggtcaggcgggagctcctgcaggtttacctcgcatagccgggtcagggcgcgggctaggtccaggtgatacctgatttccaggggctggttggtggcggcgtcgatggcttgcaagaggccgcatccccgcggcgcgactacggtaccgcgcggcgggcggtgggccgcgggggtgtccttggatgatgcatctaaaagcggtgacgcgggcgggcccccggaggtagggggggctcgggacccgccgggagagggggcaggggcacgtcggcgccgcgcgcgggcaggagctggtgctgcgcgcggaggttgctggcgaacgcgacgacgcggcggttgatctcctgaatctggcgcctctgcgtgaagacgacgggcccggtgagcttgaacctgaaagagagttcgacagaatcaatttcggtgtcgttgacggcggcctggcgcaaaatctcctgcacgtctcctgagttgtcttgataggcgatctcggccatgaactgctcgatctcttcctcctggagatctccgcgtccggctcgctccacggtggcggcgaggtcgttggagatgcgggccatgagctgcgagaaggcgttgaggcctccctcgttccagacgcggctgtagaccacgcccccttcggcatcgcgggcgcgcatgaccacctgcgcgagattgagctccacgtgccgggcgaagacggcgtagtttcgcaggcgctgaaagaggtagttgagggtggtggcggtgtgttctgccacgaagaagtacataacccagcgccgcaacgtggattcgttgatatcccccaaggcctcaaggcgctccatggcctcgtagaagtccacggcgaagttgaaaaactgggagttgcgcgccgacacggttaactcctcctccagaagacggatgagctcggcgacagtgtcgcgcacctcgcgctcaaaggctacaggggcctcttcttcttcttcaatctcctcttccataagggcctccccttcttcttcttctggcggcggtgggggaggggggacacggcggcgacgacggcgcaccgggaggcggtcgacaaagcgctcgatcatctccccgcggcgacggcgcatggtctcggtgacggcgcggccgttctcgcgggggcgcagttggaagacgccgcccgtcatgtcccggttatgggttggcggggggctgccgtgcggcagggatacggcgctaacgatgcatctcaacaattgttgtgtaggtactccgccaccgagggacctgagcgagtccgcatcgaccggatcggaaaacctctcgagaaaggcgtctaaccagtcacagtcgcaaggtaggctgagcaccgtggcgggcggcagcgggcggcggtcggggttgtttctggcggaggtgctgctgatgatgtaattaaagtaggcggtcttgagacggcggatggtcgacagaagcaccatgtccttgggtccggcctgctgaatgcgcaggcggtcggccatgccccaggcttcgttttgacatcggcgcaggtctttgtagtagtcttgcatgagcctttctaccggcacttcttcttctccttcctcttgtcctgcatctcttgcatctatcgctgcggcggcggcggagtttggccgtaggtggcgccctcttcctcccatgcgtgtgaccccgaagcccctcatcggctgaagcagggccaggtcggcgacaacgcgctcggctaatatggcctgctgcacctgcgtgagggtagactggaagtcgtccatgtccacaaagcggtggtatgcgcccgtgttgatggtgtaagtgcagttggccataacggaccagttaacggtctggtgacccggctgcgagagctcggtgtacctgagacgcgagtaagcccttgagtcaaagacgtagtcgttgcaagtccgcaccaggtactggtatcccaccaaaaagtgcggcggcggctggcggtagaggggccagcgtagggtggccggggctccgggggcgaggtcttccaacataaggcgatgatatccgtagatgtacctggacatccaggtgatgccggcggcggtggtggaggcgcgcggaaagtcacggacgcggttccagatgttgcgcagcggcaaaaagtgctccatggtcgggacgctctggccggtcaggcgcgcgcagtcgttgacgctctagaccgtgcaaaaggagagcctgtaagcgggcactcttccgtggtctggtggataaattcgcaagggtatcatggcggacgaccggggttcgaaccccggatccggccgtccgccgtgatccatgcggttaccgcccgcgtgtcgaacccaggtgtgcgacgtcagacaacgggggagcgctccttttggcttccttccaggcgcggcggatgctgcgctagcttttttggccactggccgcgcgcggcgtaagcggttaggctggaaagcgaaagcattaagtggctcgctccctgtagccggagggttattttccaagggttgagtcgcgggacccccggttcgagtctcgggccggccggactgcggcgaacgggggtttgcctccccgtcatgcaagaccccgcttgcaaattcctccggaaacagggacgagccccttttttgcttttcccagatgcatccggtgctgcggcagatgcgcccccctcctcagcagcggcaagagcaagagcagcggcagacatgcagggcaccctcccctcctcctaccgcgtcaggaggggcgacatccgcggttgacgcggcagcagatggtgattacgaacccccgcggcgccgggcccggcactacctggacttggaggagggcgagggcctggcgcggctaggagcgccctctcctgagcggtacccaagggtgcagctgaagcgtgatacgcgtgaggcgtacgtgccgcggcagaacctgtttcgcgaccgcgagggagaggagcccgaggagatgcgggatcgaaagttccacgcagggcgcgagctgcggcatggcctgaatcgcgagcggttgctgcgcgaggaggactttgagcccgacgcgcgaaccgggattagtcccgcgcgcgcacacgtggcggccgccgacctggtaaccgcatacgagcagacggtgaaccaggagattaactttcaaaaaagctttaacaaccacgtgcgtacgcttgtggcgcgcgaggaggtggctataggactgatgcatctgtgggactttgtaagcgcgctggagcaaaacccaaatagcaagccgctcatggcgcagctgttccttatagtgcagcacagcagggacaacgaggcattcagggatgcgctgctaaacatagtagagcccgagggccgctggctgctcgatttgataaacatcctgcagagcatagtggtgcaggagcgcagcttgagcctggctgacaaggtggccgccatcaactattccatgcttagcctgggcaagttttacgcccgcaagatataccataccccttacgttcccatagacaaggaggtaaagatcgaggggttctacatgcgcatggcgctgaaggtgcttaccttgagcgacgacctgggcgtttatcgcaacgagcgcatccacaaggccgtgagcgtgagccggcggcgcgagctcagcgaccgcgagctgatgcacagcctgcaaagggccctggctggcacgggcagcggcgatagagaggccgagtcctactttgacgcgggcgctgacctgcgctgggccccaagccgacgcgccctggaggcagctggggccggacctgggctggcggtggcacccgcgcgcgctggcaacgtcggcggcgtggaggaatatgacgaggacgatgagtacgagccagaggacggcgagtactaagcggtgatgtttctgatcagtcgcggccgcgatatcgctagcgaagttcctattctctagaaagtataggaacttcggatcctctagagtcgaaaaaaaaaaagcatgatgcaaaataaaaaactcaccaaggccatggcaccgagcgttggttttcttgtattccccttagtatgcggcgcgcggcgatgtatgaggaaggtcctcctccctcctacgagagtgtggtgagcgcggcgccagtggcggcggcgctgggttctcccttcgatgctcccctggacccgccgtttgtgcctccgcggtacctgcggcctaccggggggagaaacagcatccgttactctgagttggcacccctattcgacaccacccgtgtgtacctggtggacaacaagtcaacggatgtggcatccctgaactaccagaacgaccacagcaactttctgaccacggtcattcaaaacaatgactacagcccgggggaggcaagcacacagaccatcaatcttgacgaccggtcgcactggggcggcgacctgaaaaccatcctgcataccaacatgccaaatgtgaacgagttcatgtttaccaataagtttaaggcgcgggtgatggtgtcgcgcttgcctactaaggacaatcaggtggagctgaaatacgagtgggtggagttcacgctgcccgagggcaactactccgagaccatgaccatagaccttatgaacaacgcgatcgtggagcactacttgaaagtgggcagacagaacggggttctggaaagcgacatcggggtaaagtttgacacccgcaacttcagactggggtttgaccccgtcactggtcttgtcatgcctggggtatatacaaacgaagccttccatccagacatcattttgctgccaggatgcggggtggacttcacccacagccgcctgagcaacttgttgggcatccgcaagcggcaacccttccaggagggctttaggatcacctacgatgatctggagggtggtaacattcccgcactgttggatgtggacgcctaccaggcgagcttgaaagatgacaccgaacagggcgggggtggcgcaggcggcagcaacagcagtggcagcggcgcggaagagaactccaacgcggcagccgcggcaatgcagccggtggaggacatgaacgatcatgccattcgcggcgacacctttgccacacgggctgaggagaagcgcgctgaggccgaagcagcggccgaagctgccgcccccgctgcgcaacccgaggtcgagaagcctcagaagaaaccggtgatcaaacccctgacagaggacagcaagaaacgcagttacaacctaataagcaatgacagcaccttcacccagtaccgcagctggtaccttgcatacaactacggcgaccctcagaccggaatccgctcatggaccctgctttgcactcctgacgtaacctgcggctcggagcaggtctactggtcgttgccagacatgatgcaagaccccgtgaccttccgctccacgcgccagatcagcaactttccggtggtgggcgccgagctgttgcccgtgcactccaagagcttctacaacgaccaggccgtctactcccaactcatccgccagtttacctctctgacccacgtgttcaatcgctttcccgagaaccagattttggcgcgcccgccagcccccaccatcaccaccgtcagtgaaaacgttcctgctctcacagatcacgggacgctaccgctgcgcaacagcatcggaggagtccagcgagtgaccattactgacgccagacgccgcacctgcccctacgtttacaaggccctgggcatagtctcgccgcgcgtcctatcgagccgcactttttgagcaagcatgtccatccttatatcgcccagcaataacacaggctggggcctgcgcttcccaagcaagatgtttggcggggccaagaagcgctccgaccaacacccagtgcgcgtgcgcgggcactaccgcgcgccctggggcgcgcacaaacgcggccgcactgggcgcaccaccgtcgatgacgccatcgacgcggtggtggaggaggcgcgcaactacacgcccacgccgccgccagtgtccaccgtggacgcggccattcagaccgtggtgcgcggagcccggcgctacgctaaaatgaagagacggcggaggcgcgtagcacgtcgccaccgccgccgacccggcactgccgcccaacgcgcggcggcggccctgcttaaccgcgcacgtcgcaccggccgacgggcggccatgcgagccgctcgaaggctggccgcgggtattgtcactgtgccccccaggtccaggcgacgagcggccgccgcagcagccgcggccattagtgttatgactcagggtcgcaggggcaacgtgtactgggtgcgcgactcggttagcggcctgcgcgtgcccgtgcgcacccgccccccgcgcaactagattgcaataaaaaactacttagactcgtactgttgtatgtatccagcggcggcggcgcgcatcgaagctatgtccaagcgcaaaatcaaagaagagatgctccaggtcatcgcgccggagatctatggccccccgaagaaggaagagcaggattacaagccccgaaagctaaagcgggtcaaaaagaaaaagaaagatgatgatgatgatgaacttgacgacgaggtggaactgttgcacgcgaccgcgcccaggcgacgggtacagtggaaaggtcgacgcgtaagacgtgttttgcgacccggcaccaccgtagtctttacgcccggtgagcgctccacccgcacctacaagcgcgtgtatgatgaggtgtacggcgacgaggacctgcttgagcaggccaacgagcgcctcggggagtttgcctacggaaagcggcataaggacatgctggcgttgccgctggacgagggcaacccaacacctagcctaaagcccgtgacactgcagcaggtgctgcccgcgcttgcaccgtccgaagaaaagcgcggcctaaagcgcgagtctggtgacttggcacccaccgtgcagctgatggtacccaagcgtcagcgactggaagatgtcttggaaaaaatgaccgtggagcctgggctggagcccgaggtccgcgtgcggccaatcaagcaggtggcaccgggactgggcgtgcagaccgtggacgttcagatacccaccaccagtagcactagtattgccactgccacagagggcatggagacacaaacgtccccggttgcctcggcggtggcagatgccgcggtgcaggcggccgctgcggccgcgtccaagacctctacggaggtgcaaacggacccgtggatgtttcgtgtttcagccccccggcgtccgcgccgttcaaggaagtacggcgccgccagcgcgctactgcccgaatatgccctacatccttccatcgcgcctacccccggctatcgtggctacacctaccgccccagaagacgagcaactacccgacgccgaaccaccactggaacccgccgccgccgtcgccgtcgccagcccgtgctggccccgatttccgtgcgcagggtggctcgcgaaggaggcaggaccctggtgctgccaacagcgcgctaccaccccagcatcgtttaaaagccggtctttgtggttcttgcagatatggccctcacctgccgcctccgtttcccggtgccgggattccgaggaagaatgcaccgtaggaggggcatggccggccacggcctgacgggcggcatgcgtcgtgcgcaccaccggcggcggcgcgcgtcgcaccgtcgcatgcgcgccggtatcctgcccctccttattccactgatcgccgcggcgattggcgccgtgcccggaattgcatccgtggccttgcaggcgcagagacactgattaaaaacaagttacatgtggaaaaatcaaaataaaagtctggactctcacgctcgcttggtcctgtaactattttgtagaatggaagacatcaactttgcgtcactggccccgcgacacggctcgcgcccgttcatgggaaactggcaagatatcggcaccagcaatatgagcggtggcgccttcagctggggctcgctgtggagcggcattaaaaatttcggttccgccgttaagaactatggcagcaaagcctggaacagcagcacaggccagatgctgagggacaagttgaaagagcaaaatttccaacaaaaggtggtagatggcctggcctctggcattagcggggtggtggacctggccaaccaggcagtgcaaaataagattaacagtaagcttgatccccgccctcccgtagaggagcctccaccggccgtggagacagtgtctccagaggggcgtggcgaaaagcgtccgcgacccgacagggaagaaactctggtgacgcaaatagacgagcctccctcgtacgaggaggcactaaagcaaggcctgcccaccacccgtcccatcgcgcccatggctaccggagtgctgggccagcacacacccgtaacgctggacctgcctccccccgccgacacccagcagaaacctgtgctgccaggcccgtccgccgttgttgtaacccgtcctagccgcgggtccctgcgccgcgccgccagcggtccgcgatcgttgcggcccgtagccagtggcaactggcaaagcacactgaacagcatcgtgggtttgggggtgcaatccctgaagcgccgacgatgcttctgatagctaacgtgtcgtatgtgtgtcatgtatgcgtccatgtcgccgccagaggagctgctgagccgccgcgcgcccgctttccaagatggctaccccttcgatgatgccgcagtggtcttacatgcacatctcgggccaggacgcctcggagtacctgagccccgggctggtgcagttcgcccgcgccaccgagacgtacttcagcctgaataacaagtttagaaaccccacggtggcgcctacgcacgacgtgaccacagaccggtctcagcgtttgacgctgcggttcatccccgtggaccgcgaggatactgcgtactcgtacaaggcgcggttcaccctagctgtgggtgataaccgtgtgctagacatggcttccacgtactttgacatccgcggcgtgctggacaggggccctacttttaagccctactctggcactgcctacaacgcactggcccccaagggtgcccccaactcgtgcgagtgggaacaaaatgaaactgcacaagtggatgctcaagaacttgacgaagaggagaatgaagccaatgaagctcaggcgcgagaacaggaacaagctaagaaaacccatgtatatgcccaggctccactgtccggaataaaaataactaaagaaggtctacaaataggaactgccgacgccacagtagcaggtgccggcaaagaaattttcgcagacaaaacttttcaacctgaaccacaagtaggagaatctcaatggaacgaagcggatgccacagcagctggtggaagggttcttaaaaagacaactcccatgaaaccctgctatggctcatacgctagacccaccaattccaacggcggacagggcgttatggttgaacaaaatggtaaattggaaagtcaagtcgaaatgcaatttttttccacatccacaaatgccacaaatgaagttaacaatatacaaccaacagttgtattgtacagcgaagatgtaaacatggaaactccagatactcatctttcttataaacctaaaatgggggataaaaatgccaaagtcatgcttggacaacaagcaatgccaaacagaccaaattacattgcttttagagacaattttattggtctcatgtattacaacagcacaggtaacatgggtgtccttgctggtcaggcatcgcagttgaacgctgttgtagatttgcaagacagaaacacagagctgtcctaccagcttttgcttgattcaattggcgacagaacaagatacttttcaatgtggaatcaagctgttgacagctatgatccagatgtcagaattattgagaaccatggaactgaggatgagttgccaaattattgctttcctcttggtggaattgggattactgacacttttcaagctgttaaaacaactgctgctaacggggaccaaggcaatactacctggcaaaaagattcaacatttgcagaacgcaatgaaataggggtgggaaataactttgccatggaaattaacctgaatgccaacctatggagaaatttcctttactccaatattgcgctgtacctgccagacaagctaaaatacaaccccaccaatgtggaaatatctgacaaccccaacacctacgactacatgaacaagcgagtggtggctcctgggcttgtagactgctacattaaccttggggcgcgctggtctctggactacatggacaacgttaatccctttaaccacccccgccatgcgggcctgcgttaccgctccatgttgttgggaaacggccgctacgtgccctttcacattcaggtgccccaaaagttttttgccattaaaaacctcctcctcctgccaggctcatacacatatgaatggaacttcaggaaggatgttaacatggttctgcagagctctctgggaaacgaccttagagttgacggggctagcattaagtttgacagcatttgtctttacgccaccttcttccccatggcccacaacacggcctccacgctggaagccatgctcagaaatgacaccaacgaccagtcctttaatgactacctttccgccgccaacatgctatatcccatacccgccaacgccaccaacgtgcccatctccatcccatcgcgcaactgggcagcatttcgcggttgggccttcacacgcttgaagacaaaggaaaccccttccctgggatcaggctacgacccttactacacctactctggctccataccataccttgacggaaccttctatcttaatcacacctttaagaaggtggccattacttttgactcttctgttagctggccgggcaacgaccgcctgcttactcccaatgagtttgagattaagcgctcagttgacggggagggctataacgtagctcagtgcaacatgacaaaggactggttcctagtgcagatgttggccaactacaatattggctaccagggcttctacattccagaaagctacaaagaccgcatgtactcgttcttcagaaacttccagcccatgagccggcaagtggtggacgatactaaatacaaagattatcagcaggttggaattatccaccagcataacaactcaggcttcgtaggctacctcgctcccaccatgcgcgagggacaagcttaccccgctaatgttccctacccactaataggcaaaaccgcggttgatagtattacccagaaaaagtttctttgcgaccgcaccctgtggcgcatccccttctccagtaactttatgtccatgggtgcgctcacagacctgggccaaaaccttctctacgcaaactccgcccacgcgctagacatgacctttgaggtggatcccatggacgagcccacccttctttatgttttgtttgaagtctttgacgtggtccgtgtgcaccagccgcaccgcggcgtcatcgagaccgtgtacctgcgcacgcccttctcggccggcaacgccacaacataaagaagcaagcaacatcaacaacagctgccgccatgggctccagtgagcaggaactgaaagccattgtcaaagatcttggttgtgggccatattttttgggcacctatgacaagcgcttcccaggctttgtttccccacacaagctcgcctgcgccatagttaacacggccggtcgcgagactgggggcgtacactggatggcctttgcctggaacccgcgctcaaaaacatgctacctctttgagccctttggcttttctgaccaacgtctcaagcaggtttaccagtttgagtacgagtcactcctgcgccgtagcgccattgcctcttcccccgaccgctgtataacgctggaaaagtccacccaaagcgtgcaggggcccaactcggccgcctgtggcctattctgctgcatgtttctccacgcctttgccaactggccccaaactcccatggatcacaaccccaccatgaaccttattaccggggtacccaactccatgcttaacagtccccaggtacagcccaccctgcgccgcaaccaggaacagctctacagcttcctggagcgccactcgccctacttccgcagccacagtgcgcaaattaggagcgccacttctttttgtcacttgaaaaacatgtaaaaataatgtactaggagacactttcaataaaggcaaatgtttttatttgtacactctcgggtgattatttacccccacccttgccgtctgcgccgtttaaaaatcaaaggggttctgccgcgcatcgctatgcgccactggcagggacacgttgcgatactggtgtttagtgctccacttaaactcaggcacaaccatccgcggcagctcggtgaagttttcactccacaggctgcgcaccatcaccaacgcgtttagcaggtcgggcgccgatatcttgaagtcgcagttggggcctccgccctgcgcgcgcgagttgcgatacacagggttacagcactggaacactatcagcgccgggtggtgcacgctggccagcacgctcttgtcggagatcanatccgcgtccaggtcctccgcgttgctcagggcgaacggagtcaactttggtagctgccttcccaaaaagggtgcatgcccaggctttgagttgcactcgcaccgtagtggcatcagaaggtgaccgtgcccagtctgggcgttaggatacagcgcctgcatgaaagccttgatctgcttaaaagccacctgagcctttgcgccttcagagaagaacatgccgcaagacttgccggaaaactgattggccggacaggccgcgtcatgcacgcagcaccttgcgtcggtgttggagatctgcaccacatttcggccccaccggttcttcacgatcttggccttgctagactgctccttcagcgcgcgctgcccgttttcgctcgtcacatccatttcaatcacgtgctccttatttatcataatgctcccgtgtagacacttaagctcgccttcgatctcagcgcagcggtgcagccacaacgcgcagcccgtgggctcgtggtgcttgtaggttacctctgcaaacgactgcaggtacgcctgcaggaatcgccccatcatcgtcacaaaggtcttgttgctggtgaaggtcagctgcaacccgcggtgctcctcgtttagccaggtcttgcatacggccgccagagcttccacttggtcaggcagtagcttgaagtttgcctttagatcgttatccacgtggtacttgtccatcaacgcgcgcgcagcctccatgcccttctcccacgcagacacgatcggcaggctcagcgggtttatcaccgtgctttcactttccgcttcactggactcttccttttcctcttgcatccgcataccccgcgccactgggtcgtcttcattcagccgccgcaccgtgcgcttacctcccttgccgtgcttgattagcaccggtgggttgctgaaacccaccatttgtagcgccacatcttctctttcttcctcgctgtccacgatcacctctggggatggcgggcgctcgggcttgggagaggggcgcttctttttctttttggacgcaatggccaaatccgccgtcgaggtcgatggccgcgggctgggtgtgcgcggcaccagcgcatcttgtgacgagtcttcttcgtcctcggactcgagacgccgcctcagccgcttttttgggggcgcgcggggaggcggcggcgacggcgacggggacgagacgtcctccatggttggtggacgtcgcgccgcaccgcgtccgcgctcgggggtggtttcgcgctgctcctcttcccgactggccatttccttctcctataggcagaaaaagatcatggagtcagtcgagaaggaggacagcctaaccgccccctttgagttcgccaccaccgcctccaccgatgccgccaacgcgcctaccaccttccccgtcgaggcacccccgcttgaggaggaggaagtgattatcgagcaggacccaggttttgtaagcgaagacgacgaagatcgctcagtaccaacagaggataaaaagcaagaccaggacgacgcagaggcaaacgaggaacaagtcgggcggggggaccaaaggcatggcgactacctagatgtgggagacgacgtgctgttgaagcatctgcagcgccagtgcgccattatctgcgacgcgttgcaagagcgcagcgatgtgcccctcgccatagcggatgtcagccttgcctacgaacgccacctgttctcaccgcgcgtaccccccaaacgccaagaaaacggcacatgcgagcccaacccgcgcctcaacttctaccccgtatttgccgtgccagaggtgcttgccacctatcacatctttttccaaaactgcaagatacccctatcctgccgtgccaaccgcagccgagcggacaagcagctggccttgcggcagggcgctgtcatacctgatatcgcctcgctcgacgaagtgccaaaaatctttgagggtcttggacgcgacgagaagcgcgcggcaaacgctctgcaacaagaaaacagcgaaaatgaaagtcactgtggagtgctggtggaacttgagggtgacaacgcgcgcctagccgtgctgaaacgcagcatcgaggtcacccactttgcctacccggcacttaacctaccccccaaggttatgagcacagtcatgagcgagctgatcgtgcgccgtgcacgacccctggagagggatgcaaacttgcaagaacaaaccgaggagggcctacccgcagttggcgatgagcagctggcgcgctggcttgagacgcgcgagcctgccgacttggaggagcgacgcaagctaatgatggccgcagtgcttgttaccgtggagcttgagtgcatgcagcggttctttgctgacccggagatgcagcgcaagctagaggaaacgttgcactacacctttcgccagggctacgtgcgccaggcctgcaaaatttccaacgtggagctctgcaacctggtctcctaccttggaattttgcacgaaaaccgccttgggcaaaacgtgcttcattccacgctcaagggcgaggcgcgccgcgactacgtccgcgactgcgtttacttatttctgtgctacacctggcaaacggccatgggcgtgtggcagcagtgcctggaggagcgcaacctgaaggagctgcagaagctgctaaagcaaaacttgaaggacctatggacggccttcaacgagcgctccgtggccgcgcacctggcggacattatcttccccgaacgcctgcttaaaaccctgcaacagggtctgccagacttcaccagtcaaagcatgttgcaaaactttaggaactttatcctagagcgttcaggaattctgcccgccacctgctgtgcgcttcctagcgactttgtgcccattaagtaccgtgaatgccctccgccgctttggggtcactgctaccttntgcagctagccaactaccttgcctaccactccgacatcatggaagacgtgagcggtgacggcctactggagtgtcactgtcgctgcaacctatgcaccccgcaccgctccctggtctgcaattcacaactgcttagcgaaagtcaaattatcggtacctttgagctgcagggtccctcgcctgacgaaaagtccgcggctccggggttgaaactcactccggggctgtggacgtcggcttaccttcgcaaatttgtacctgaggactaccacgcccacgagattaggttctacgaagaccaatcccgcccgccaaatgcggagcttaccgcctgcgtcattacccagggccacatccttggccaattgcaagccattaacaaagcccgccaagagtttctgctacgaaagggacggggggtttacttggacccccagtccggcgaggagctcaacccaatccccccgccgccgcagccctatcagcagccgcgggcccttgcttcccaggatggcacccaaaaagaagctgcagctgccgccgccgccacccacggacgaggaggaatactgggacagtcaggcagaggaggttttggacgaggaggaggagatgatggaagactgggacagcctagacgaggaagcttccgaggccgaagaggtgtcagacgaaacaccgtcaccctcggtcgcattcccctcgccggcgccccagaaatcggcaaccgttcccagcattgctacaacctccgctcctcaggcgccgccggcactgcccgttcgccgacccaaccgtagatgggacaccactggaaccagggccggtaagtctaagcagccgccgccgttagcccaagagcaacaacagcgccaaggctaccgctcgtggcgcgtgcacaagaacgccatagttgcttgcttgcaagactgtgggggcaacatctccttcgcccgccgctttcttctctaccatcacggcgtggccttcccccgtaacatcctgcattactaccgtcatctctacagcccctactgcaccggcggcagcggcagcaacagcagcggccacgcagaagcaaaggcgaccggatagcaagactctgacaaagcccaagaaatccacagcggcggcagcagcaggaggaggagcactgcgtctggcgcccaacgaacccgtatcgacccgcgagcttagaaacaggatttttcccactctgtatgctatatttcaacagagcaggggccaagaacaagagctgaaaataaaaaacaggtctctgcgctccctcacccgcagctgcctgtatcacaaaagcgaagatcagcttcggcgcacgctggaagacgcggaggctctcttcagcaaatactgcgcgctgactcttaaggactagtttcgcgccctttctcaaatttaagcgcgaaaactacgtcatctccagcggccacacccggcgccagcacctgtcgtcagcgccattatgagcaaggaaattcccacgccctacatgtggagttaccagccacaaatgggacttgcggctggagctgcccaagactactcaacccgaataaactacatgagcgcgggaccccacatgatatcccgggtcaacggaatccgcgcccaccgaaaccgaattctcctcgaacaggcggctattaccaccacacctcgtaataaccttaatccccgtagttggcccgctgccctggtgtaccaggaaagtcccgctcccaccactgtggtacttcccagagacgcccaggccgaagttcagatgactaactcaggggcgcagcttgcgggcggctttcgtcacagggtgcggtcgcccgggcagggtataactcacctgaaaatcagagggcgaggtattcagctcaacgacgagtcggtgagctcctctcttggtctccgtccggacgggacatttcagatcggcggcgcgtggccgctcttcatttacgccccgtcaggcgatcctaactctgcagacctcgtcctcggagccgcgctccggaggcattggaactctacaatttattgaggagttcgtgccttcggtttacttcaaccccttttctggacctcccggccactacccggaccagtttattcccaactttgacgcggtaaaagactcggcggacggctacgactgaatgaccagtggagaggcagagcaactgcgcctgacacacctcgaccactgccgccgccacaagtgctttgcccgcggctccggtgagttttgttactttgaattgcccgaagagcatatcgagggcccggcgcacggcgtccggctcaccacccaggtagggataacagggtaattgagacatgattcctcgagtccttatattattgacccttgttgcgcttttctgtgcgtgctctacattggctgcggtcgctcacatcgaagtagattgcatcccacctttcacagtttacctgctttacggatttgtcacccttatcctcatctgcagcctcgtcactgtagtcatcgccttcattcagttcattgactggatttgtgtgcgcattgcgtaccttaggcaccatccgcaatacagagacaggactatagctgatcttctcagaattctttaattatgaaacggattgtcacttttgttttgctgattttctgcgccctacctgtgctttgctcccaaacctcagcgcctcccaaaagacatatttcctgcagattcactcaaatatggaacattcccagctgctacaacaaacagagcgatttgtcagaagcctggttatacgccatcatctctgtcatggttttttgcagtaccatttttgccctagccatatacccataccttgacattggttggaatgccatagatgccatgaaccaccctactttcccagcgcccaatgtcataccactgcaacaggttattgccccaatcaatcagcctcgccccccttctcccacccccactgagattagctactttaatttgacaggtggagatgactgaatctctagatctagaattggatggaattaacaccgaacagcgcctactagaaaggcgcaaggcggcgtccgagcgagaacgcctaaaacaagaagttgaagacatggttaacctgcaccagtgtaaaagaggtatcttttgtgtggtcaagcaggccaaacttacctacgaaaaaaccactaccggcaaccgccttagctacaagctacccacccagcgccaaaaactggtgcttatggtgggagaaaaacctatcaccgtcacccagcactcggcagaaacagaaggctgcctgcacttcccctatcagggtccagaggacctctgcactcttattaaaaccatgtgtggcattagagatcttattccattcaactaacaataaacacacaataaattacttacttaaaatcagtcagcaaatctttgtccagcttattcagcatcacctcctttccctcctcccaactctggtatttcagcagccttttagctgcgaactttctccaaagtctaaatgggatgtcaaattcctcatgttcttgtccctccgcacccactatcttcatattgttgcagatgaaacgcgccagaccgtctgaagacaccttcaaccctgtgtacccatatgacacggaaaccggccctccaactgtgcctttccttacccctccctttgtgtcgccaaatgggttccaagaaagtccccccggagtgctttctttgcgtctttcagaacctttggttacctcacacggcatgcttgcgctaaaaatgggcagcggcctgtccctggatcaggcaggcaaccttacatcaaatacaatcactgtttctcaaccgctaaaaaaaacaaagtccaatataactttggaaacatccgcgccccttacagtcagctcaggcgccctaaccatggccacaacttcgcctttggtggtctctgacaacactcttaccatgcaatcacaagcaccgctaaccgtgcaagactcaaaacttagcattgctaccaaagagccacttacagtgttagatggaaaactggccctgcagacatcagcccccctctctgccactgataacaacgccctcactatcactgcctcacctcctcttactactgcaaatggtagtctggctgttaccatggaaaacccactttacaacaacaatggaaaacttgggctcaaaattggcggtcctttgcaagtggccaccgactcacatgcactaacactaggtactggtcagggggttgcagttcataacaatttgctacatacaaaagttacaggcgcaatagggtttgatacatctggcaacatggaacttaaaactggagatggcctctatgtggatagcgccggtcctaaccaaaaactacatattaatctaaataccacaaaaggccttgcttttgacaacaccgcaataacaattaacgctggaaaagggttggaatttgaaacagactcctcaaacggaaatcccataaaaacaaaaattggatcaggcatacaatataataccaatggagctatggttgcaaaacttggaacaggcctcagttttgacagctccggagccataacaatgggcagcataaacaatgacagacttactctttggacaacaccagacccatccccaaattgcagaattgcttcagataaagactgcaagctaactctggcgctaacaaaatgtggcagtcaaattttgggcactgtttcagctttggcagtatcaggtaatatggcctccatcaatggaactctaagcagtgtaaacttggttcttagatttgatgacaacggagtgcttatgtcaaattcatcactggacaaacagtattggaactttagaaacggggactccactaacggtcaaccatacacttatgctgttgggtttatgccaaacctaaaagcttacccaaaaactcaaagtaaaactgcaaaaagtaatattgttagccaggtgtatcttaatggtgacaagtctaaaccattgcattttactattacgctaaatggaacagatgaaaccaaccaagtaagcaaatactcaatatcattcagttggtcctggaacagtggacaatacactaatgacaaatttgccaccaattcctataccttctcctacattgcccaggaataaagaatcgtgaacctgttgcatgttatgtttcaacgtgtttatttttcaattcgtattagtcatcgctattaccatggtgatgcggttttggcagtacatcaatgggcgtggatagcggtttgactcacggggatttccaagtctccaccccattgacgtcaatgggagtttgttttggcaccaaaatcaacgggactttccaaaatgtcgtaacaactccgccccattgacgcaaatgggcggtaggcgtgtacggtgggaggtctatataagcagagctggtttagtgaaccgtcagatccgctagagatccaccatgtttgtctttctcgtgctgctgcccctcgtgagcagccagtgcgtcaatctgacaacaaggacccagctgccccccgcctacaccaactccttcacaagaggcgtgtattaccccgataaggtcttcagatccagcgtcctccacagcacccaagatttgtttctgcctttcttcagcaacgtgacatggttccacgccattcatgtcagcggcacaaacggcacaaagaggtttgacaaccccgtgctccccttcaacgacggcgtgtacttcgccagcacagagaaatccaatatcattaggggctggatcttcggcacaacactggattccaagacccagtctctgctcattgtgaataacgccaccaacgtggtgattaaggtctgtgagtttcagttctgcaacgacccctttctgggagtctactaccacaagaataataagagctggatggagtccgagtttagggtgtacagctccgccaacaactgtaccttcgaatacgtgtcccagcctttcctcatggatctggagggcaagcaaggcaatttcaaaaatctgagagagttcgtgttcaaaaacattgatggatacttcaaaatctacagcaagcatacccccattaatctggtgagggatctgccccaaggattctccgctctggaacctctggtggatctgcccattggcattaacatcacaagattccagaccctcctcgccctccatagatcctatctgacccccggcgactcctccagcggatggacagccggagctgccgcctactacgtgggctatctgcagccaagaacctttctgctgaagtacaacgagaacggcaccatcacagacgctgtcgattgcgctctcgaccctctgagcgagaccaaatgcacactgaagagcttcaccgtggaaaagggcatctatcagaccagcaacttcagagtgcagcctaccgagagcattgtgaggtttcccaacatcaccaatctgtgtcctttcggcgaggtctttaatgccacaaggttcgcttccgtgtatgcttggaataggaagaggatcagcaattgcgtcgccgactattccgtcctctataacagcgcctccttctccaccttcaaatgttatggcgtgtcccccaccaagctcaacgacctctgcttcaccaatgtgtacgctgactccttcgtcattaggggcgacgaggtgaggcaaattgcccccggccagaccggcaagattgctgattacaactacaaactgcccgacgattttaccggctgcgtgatcgcttggaactccaacaatctggactccaaagtgggcggaaactacaattacctctacagactctttagaaaaagcaatctgaagcccttcgagagagacatctccaccgaaatctaccaagccggaagcacaccttgcaatggcgtcgagggatttaactgctacttccctctgcagagctacggctttcaacctaccaacggcgtcggatatcaaccctatagggtggtcgtgctgagctttgaactgctgcatgctcccgccaccgtctgcggacctaagaagagcaccaatctcgtcaaaaacaagtgcgtgaacttcaacttcaatggactgaccggcaccggcgtgctgaccgagagcaataagaagtttctgcccttccagcagttcggaagggatattgccgataccacagatgctgtgagggacccccaaaccctcgagattctggatatcaccccttgcagcttcggaggagtgtccgtgatcacccccggaacaaacacctccaatcaagtggctgtgctgtaccaagacgtgaactgcacagaagtccccgtggccatccatgccgaccagctgacccctacatggagagtgtactccaccggcagcaatgtgttccagacaagagccggatgcctcattggagctgaacacgtcaacaacagctacgagtgcgacattcccatcggcgccggcatttgtgcctcctatcagacccagaccaacagcccaagaagggctagaagcgtcgcttcccaatccatcattgcctacaccatgtctctgggagccgaaaactccgtcgcctactccaacaatagcatcgccatccccaccaattttaccatctccgtgaccacagagattctgcccgtgtccatgacaaagacatccgtggactgcaccatgtacatctgtggcgacagcaccgagtgtagcaatctgctgctgcaatatggcagcttctgcacccagctgaacagagccctcaccggcatcgccgtcgaacaagacaagaacacccaagaggtgttcgcccaagtgaagcaaatctacaagaccccccctatcaaagatttcggaggattcaactttagccagattctgcccgatcctagcaagccttccaagaggagcttcatcgaggatctgctgtttaataaggtgacactggccgacgctggcttcattaaacagtacggcgattgtctgggcgacatcgctgctagggatctgatctgcgctcagaagttcaacggactgacagtcctccctcctctgctgaccgacgagatgatcgctcagtataccagcgctctgctggctggaaccattaccagcggctggacattcggcgctggagccgccctccaaattccctttgccatgcagatggcctatagattcaacggcattggcgtcacccaaaatgtgctgtatgaaaatcagaagctgattgctaaccaattcaatagcgccattggcaagatccaagactctctgagctccacagccagcgccctcggaaagctgcaagacgtggtgaatcaaaacgcccaagctctgaacacactggtgaaacagctcagcagcaactttggagccatcagcagcgtgctcaatgatatcctctctaggctggaccctccggaggccgaagtccagatcgatagactcatcaccggcagactccaatctctgcagacatacgtcacccaacagctcattagagctgccgaaatcagagcctccgccaatctggccgccaccaagatgtccgagtgcgtgctgggacagagcaagagagtggacttctgtggcaagggataccatctgatgagcttcccccagagcgctccccatggagtggtctttctgcatgtcacatacgtgcccgcccaagagaagaacttcaccaccgctcccgccatttgccacgatggaaaggcccactttcccagagaaggagtgttcgtgagcaacggcacacactggtttgtcacccagagaaatttttacgagccccagattatcaccaccgacaacaccttcgtgtccggaaactgcgatgtcgtgattggcatcgtgaacaacacagtctacgaccctctgcagcccgaactcgacagcttcaaggaagagctggacaagtacttcaagaatcacacatcccccgacgtggatctgggcgacattagcggcattaatgcctccgtcgtcaacattcagaaggagattgatagactgaatgaagtcgccaagaacctcaatgagtctctgattgatctgcaagagctgggcaagtacgagcaatacatcaaatggccttggtacatctggctgggattcatcgctggactcatcgccatcgtgatggtcaccattatgctgtgttgcatgaccagctgctgcagctgtctgaagggctgctgcagctgcggaagctgctgcaagtttgacgaagacgactccgagcccgtgctgaagggcgtcaagctgcattatacataaactagtgctggaattcgcccttatagagtgctggaattcgcccttatagagtgctggaattcgcccttatatctagtaacggccgccagtgtgctggaattcgcccttataacttcgtatagcatacattatacgaagttataagggcgaattctgcagatatccatcctttaaaaaacctcccacacctccccctgaacctgaaacataaaatgaatgcaattgttgttgttaacttgtttattgcagcttataatggttacaaataaagcaatagcatcacaaatttcacaaataaagcatttttttcactgcattctagttgtggtttgtccaaactcatcaatgtatcttaacaacgtgtttatttttcaattgcagaaagaattgcagaaaatttcaagtcatttttcattcagtagtatagccccaccaccacatagcttatactaatcaccgtaccttaatcaaactcacagaaccctagtattcaacctgccacctccctcccaacacacagagtacacagtcctttctccccggctggccttaaacagcatcatatcatgggtaacagacatattcttaggtgttatattccacacggtctcctgtcgagccaaacgctcatcagtgatgttaataaactccccgggcagctcgcttaagttcatgtcgctgtccagctgctgagccacaggctgctgtccaacttgcggttgctcaacgggcggcgaaggagaagtccacgcctacatgggggtagagtcataatcgtgcatcaggatagggcggtggtgctgcagcagcgcgcgaataaactgctgccgccgccgctccgtcctgcaggaatacaacatggcagtggtctcctcagcgatgattcgcaccgcccgcagcataaggcgccttgtcctccgggcacagcagcgcaccctgatctcacttaagtcagcacagtaactgcagcacagtaccacaatattgtttaaaatcccacagtgcaaggcgctgtatccaaagctcatggcggggaccacagaacccacgtggccatcataccacaagcgcaggtagattaagtggcgacccctcataaacacgctggacataaacattacctcttttggcatgttgtaattcaccacctcccggtaccatataaacctctgattaaacatggcgccatccaccaccatcctaaaccagctggccaaaacctgcccgccggctatgcactgcagggaaccgggactggaacaatgacagtggagagcccaggactcgtaaccatggatcatcatgctcgtcatgatatcaatgttggcacaacacaggcacacgtgcatacacttcctcaggattacaagctcctcccgcgtcagaaccatatcccagggaacaacccattcctgaatcagcgtaaatcccacactgcagggaagacctcgcacgtaactcacgttgtgcattgtcaaagtgttacattcgggcagcagcggatgatcctccagtatggtagcgcgtgtctctgtctcaaaaggaggtaggcgatccctactgtacggagtgcgccgagacaaccgagatcgtgttggtcgtagtgtcatgccaaatggaacgccggacgtagtcatatttcctgaagcaaaaccaggtgcgggcgtgacaaacagatctgcgtctccggtctcgtcgcttagctcgctctgtgtagtagttgtagtatatccactctctcaaagcatccaggcgccccctggcttcgggttctatgtaaactccttcatgcgccgctgccctgataacatccaccaccgcagaataagccacacccagccaacctacacattcgttctgcgagtcacacacgggaggagcgggaagagctggaagaaccatgttttttttttttattccaaaagattatccaaaacctcaaaatgaagatctattaagtgaacgcgctcccctccggtggcgtggtcaaactctacagccaaagaacagataatggcatttgtaagatgttgcacaatggcttccaaaaggcaaactgccctcacgtccaagtggacgtaaaggctaaacccttcanggtgaatctcctctataaacattccagcaccttcaaccatgcccaaataattttcatctcgccaccttatcaatatgtctctaagcaaatcccgaatattaagtccggccattgtaaaaatctgctccagagcgccctccaccttcagcctcaagcagcgaatcatgattgcaaaaattcaggttcctcacagacctgtataagattcaaaagcggaacattaacaaaaataccgcgatcccgtaggtcccttcgcagggccagctgaacataatcgtgcaggtctgcacggaccagcgcggccacttccccgccaggaaccatgacaaaagaacccacactgattatgacacgcatactcggagctatgctaaccagcgtagccccgatgtaagcttgttgcatgggcggcgatataaaatgcaaggtactgctcaaaaaatcaggcaaagcctcgcgcaaaaaagcaagcacatcgtagtcatgctcatgcagataaaggcaggtaagttccggaaccaccacagaaaaagacaccatttttctctcaaacatgtctgcgggttcctgcataaacacaaaataaaataacaaaaaaaaaaaaacatttaaacattagaagcctgtcttacaacaggaaaaacaacccttataagcataagacggactacggccatgccggcgtgaccgtaaaaaaactggtcaccgtgattaaaaagcaccaccgacagttcctcggtcatgtccggagtcataatgtaagactcggtaaacacatcaggttggttaacatcggtcagtgctaaaaagcgaccgaaatagcccgggggaatacatacccgcaggcgtagagacaacattacagcccccataggaggtataacaaaattaataggagagaaaaacacataaacccctgaaaaaccctcctgcccctaggcaaaatagcaccctcccgctccagaacaacatacagcgcttccacagcggcagccataacagtcagccttaccagtaaaaaaacctattaaaaaacaccactcgacacggcaccagctcaatcagtcacagtgtaaaaagggccaagtacagagcgagtatatataggactaaaaaatgacgtaacggttaaagtccacaaaaaccacccagaaaaccgcacgcgaacctacgcccagaaacgaaagccaaaaaacccacaacttcctcaaatcttcacttccgttttcccacgatacgtcacttcccattttaaaaaaaaactacaattcccaatacatgcaagttactccgccctaaaacctacgtcacccgccccgttcccacgccccgcgccacgtcacaaactccaccccctcattatcatattggcttcaatccaaaataaggtatattattgatgatggcgat

SEQ ID NO: 32 - DNA, 36281 bp, Artificial
  nucleic acid sequence of SC-Ad-FZF-657-(delta)IIIF-(delta)E3-Spike-3X-L
  misc_feature (7190)..(7190): n is a, c, g, or t
  misc_feature (21647)..(21647): n is a, c, g, or t
  misc_feature (24583)..(24583): n is a, c, g, or t
  misc_feature (34871)..(34871): n is a, c, g, or t
cgccatcatcaataatataccttattttggattgaagccaatatgataatgagggggtggagtttgtgacgtggcgcggggcgtgggaacggggcgggtgacgtagtagtgtggcggaagtgtgatgttgtaagtgtggcggaacacatgtaagcgccggatgtggtaaaagtgacgtttttggtgtgcgccggtgtacacgggaagtgacaattttcgcgcggttttaggcggatgttgtagtaaatttgggcgtaaccaagtaatatttggccattttcgcgggaaaactgaataagaggaagtgaaatctgaataattctgtgttactcatagcgcgtaatatttgtctagggccgcggggactttgaccgtttacgtggagactcgcccaggtgtttttctcaggtgttttccgcgttccgggtcaaagttggcgttttattattatagtcagctgacgcgcagtgtatttatacccggtgagttcctcaagaggccactcttgagtgccagcgagtagagttttctcctccgagccgctccgacaccgggactgaaaatgagacatattatctgccacggaggtgttattaccgaagaaatggccgccagtcttttggaccagctgatcgaagaggtactggctgataatcttccacctcctagccattttgaaccacctacccttcacgaactgtatgatttagacgtgacggcccccgaagatcccaacgaggaggcggtttcgcagatttttcccgagtctgtaatgttggcggtgcaggaagggattgacttattcacttttccgccggcgcccggttctccggagccgcctcacctttcccggcagcccgagcagccggagcagagagccttgggtccggtttctatgccaaaccttgtgccggaggtgatcgatcttacctgccacgaggctggctttccacccagtgacgacgaggatgaagagggtgaggagtttgtgttagattatgtggagcaccccgggcacggttgcaggtcttgtcattatcaccggaggaatacgggggacccagatattatgtgttcgctttgctatatgaggacctgtggcatgtttgtctacagtaagtgaaaaattatgggcagtgggtgatagagtggtgggtttggtgtggtaattttttttttaatttttacagttttgtggtttaaagaattttgtattgtgattttttaaaaggtcctgtgtctgaacctgagcctgagcccgagccagaaccggagcctgcaagacctacccggcgtcctaaattggtgcctgctatcctgagacgcccgacatcacctgtgtctagagaatgcaatagtagtacggatagctgtgactccggtccttctaacacacctcctgagatacacccggtggtcccgctgtgccccattaaaccagttgccgtgagagttggtgggcgtcgccaggctgtggaatgtatcgaggacttgcttaacgagtctgggcaacctttggacttgagctgtaaacgccccaggccataaggtgtaaacctgtgattgcgtgtgtggttaacgcctttgtttgctgaatgagttgatgtaagtttaataaagggtgagataatgtttaacttgcatggcgtgttaaatggggcggggcttaaagggtatataatgcgccgtgggctaatcttggttacatctgacctcatggaggcttgggagtgtttggaagatttttctgctgtgcgtaacttgctggaacagagctctaacagtacctcttggttttggaggtttctgtggggctcctcccaggcaaagttagtctgcagaattaaggaggattacaagtgggaatttgaagagcttttgaaatcctgtggtgagctgtttgattctttgaatctgggtcaccaggcgcttttccaagagaaggtcatcaagactttggatttttccacaccggggcgcgctgcggctgctgttgcttttttgagttttataaaggataaatggagcgaagaaacccatctgagcggggggtacctgctggattttctggccatgcatctgtggagagcggtggtgagacacaagaatcgcctgctactgttgtcttccgtccgcccggcaataataccgacggaggagcaacagcaggaggaagccaggcggcggcggcggcaggagcagagcccatggaacccgagagccggcctggaccctcgggaatgaatgttgtacaggtggctgaactgtttccagaactgagacgcattttaaccattaacgaggatgggcaggggctaaagggggtaaagagggagcggggggcttctgaggctacagaggaggctaggaatctaacttttagcttaatgaccagacaccgtcctgagtgtgttacttttcagcagattaaggataattgcgctaatgagcttgatctgctggcgcagaagtattccataaagcagctgaccacttactggctgcagccaggggatgattttgaggaggctattagggtatatgcaaaggtggcacttaggccagattgcaagtacaagattagcaaacttgtaaatatcaggaattgttgctacatttctgggaacggggccgaggtggagatagatacggaggatagggtggcctttagatgtagcatgataaatatgtggccgggggtgcttggcatggacggggtggttattatgaatgtgaggtttactggtcccaattttagcggtacggttttcctggccaataccaatcttatcctacacggtgtaagcttctatgggtttaacaatacctgtgtggaagcctggaccgatgtaagggttcggggctgtgccttttactgctgctggaagggggtggtgtgtcgccccaaaagcagggcttcaattaagaaatgcctgtttgaaaggtgtaccttgggtatcctgtctgagggtaactccagggtgcgccacaatgtggcctccgactgtggttgctttatgctagtgaaaagcgtggctgtgattaagcataacatggtgtgtggcaactgcgaggacagggcctctcagatgctgacctgctcggacggcaactgtcacttgctgaagaccattcacgtagccagccactctcgcaaggcctggccagtgtttgagcacaacatactgacccgctgttccttgcatttgggtaacaggaggggggtgttcctaccttaccaatgcaatttgagtcacactaagatattgcttgagcccgagagcatgtccaaggtgaacctgaacggggtgtttgacatgaccatgaagatctggaaggtgctgaggtacgatgagacccgcaccaggtgcagaccctgcgagtgtggcggtaaacatattaggaaccagcctgtgatgctggatgtgaccgaggagctgaggcccgatcacttggtgctggcctgcacccgcgctgagtttggctctagcgatgaagatacagattgaggtactgaaatgtgtgggcgtggcttaagggtgggaaagaatatataaggtgggggtctcatgtagttttgtatctgttttgcagcagccgccgccatgagcgccaactcgtttgatggaagcattgtgagctcatatttgacaacgcgcatgcccccatgggccggggtgcgtcagaatgtgatgggctccagcattgatggtcgccccgtcctgcccgcaaactctactaccttgacctacgagaccgtgtctggaacgccgttggagactgcagcctccgccgccgcttcagccgctgcagccaccgcccgcgggattgtgactgactttgctttcctgagcccgcttgcaagcagtgcagcttcccgttcatccgcccgcgatgacaagttgacggctcttttggcacaattggattctttgacccgggaacttaatgtcgtttctcagcagctgttggatctgcgccagcaggtttctgccctgaaggcttcctcccctcccaatgcggtttaaaacataaataaaaaccagactctgtttggatttggatcaagcaagtgtcttgctgtctttatttaggggttttgcgcgcgcggtaggcccgggaccagcggtctcggtcgttgagggtcctgtgtattttttccaggacgtggtaaaggtgactctggatgttcagatacatgggcataagcccgtctctggggtggaggtagcaccactgcagagcttcatgctgcggggtggtgttgtagatgatccagtcgtagcaggagcgctgggcgtggtgcctaaaaatgtctttcagtagcaagctgattgccaggggcaggcccttggtgtaagtgtttacaaagcggttaagctgggatgggtgcatacgtggggatatgagatgcatcttggactgtatttttaggttggctatgttcccagccatatccctccggggattcatgttgtgcagaaccaccagcacagtgtatccggtgcacttgggaaatttgtcatgtagcttagaaggaaatgcgtggaagaacttggagacgcccttgtgacctccaagattttccatgcattcgtccataatgatggcaatgggcccacgggcggcggcctgggcgaagatatttctgggatcactaacgtcatagttgtgttccaggatgagatcgtcataggccatttttacaaagcgcgggcggagggtgccagactgcggtataatggttccatccggcccaggggcgtagttaccctcacagatttgcatttcccacgctttgagttcagatggggggatcatgtctacctgcggggcgatgaagaaaaccgtttccggggtaggggagatcagctgggaagaaagcaggttcctaagcagctgcgacttaccgcagccggtgggcccgtaaatcacacctattaccggctgcaactggtagttaagagagctgcagctgccgtcatccctgagcaggggggccacttcgttaagcatgtccctgacttgcatgttttccctgaccaaatccgccagaaggcgctcgccgcccagcgatagcagttcttgcaaggaagcaaagtttttcaacggtttgaggccgtccgccgtaggcatgcttttgagcgtttgaccaagcagttccaggcggtcccacagctcggtcacgtgctctacggcatctcgatccagcatatctcctcgtttcgcgggttggggcggctttcgctgtacggcagtagtcggtgctcgtccagacgggccagggtcatgtctttccacgggcgcagggtcctcgtcagcgtagtctgggtcacggtgaaggggtgcgctccgggttgcgcgctggccagggtgcgcttgaggctggtcctgctggtgctgaagcgctgccggtcttcgccctgcgcgtcggccaggtagcatttgaccatggtgtcatagtccagcccctccgcggcgtggcccttggcgcgcagcttgcccttggaggaggcgccgcacgaggggcagtgcagacttttaagggcgtagagcttgggcgcgagaaataccgattccggggagtaggcatccgcgccgcaggccccgcagacggtctcgcattccacgagccaggtgagctctggccgttcggggtcaaaaaccaggtttcccccatgctttttgatgcgtttcttacctctggtttccatgagccggtgtccacgctcggtgacgaaaaggctgtccgtgtccccgtatacagacttgagaggcctgtcctcgagcggtgttccgcggtcctcctcgtatagaaactcggaccactctgagacgaaggctcgcgtccaggccagcacgaaggaggctaagtgggaggggtagcggtcgttgtccactagggggtccactcgctccagggtgtgaagacacatgtcgccctcttcggcatcaaggaaggtgattggtttataggtgtaggccacgtgaccgggtgttcctgaaggggggctataaaagggggtgggggcgcgttcgtcctcactctcttccgcatcgctgtctgcgagggccagctgttggggtgagtactccctctcaaaagcgggcatgacttctgcgctaagattgtcagtttccaaaaacgaggaggatttgatattcacctggcccgcggtgatgcctttgagggtggccgcgtccatctggtcagaaaagacaatctttttgttgtcaagcttggtggcaaacgacccgtagagggcgttggacagcaacttggcgatggagcgcagggtttggtttttgtcgcgatcggcgcgctccttggccgcgatgtttagctgcacgtattcgcgcgcaacgcaccgccattcgggaaagacggtggtgcgctcgtcgggcactaggtgcacgcgccaaccgcggttgtgcagggtgacaaggtcaacgctggtggctacctctccgcgtaggcgctcgttggtccagcagaggcggccgcccttgcgcgagcagaatggcggtagtgggtctagctgcgtctcgtccggggggtctgcgtccacggtaaagaccccgggcagcaggcgcgcgtcgaagtagtctatcttgcatccttgcaagtctagcgcctgctgccatgcgcgggcggcaagcgcgcgctcgtatgggttgagtgggggaccccatggcatggggtgggtgagcgcggaggcgtacatgccgcaaatgtcgtaaacgtagaggggctctctgagtattccaagatatgtagggtagcatcttccaccgcggatgctggcgcgcacgtaatcgtatagttcgtgcgagggagcgaggaggtcgggaccgaggttgctacgggcgggctgctctgctcggaagactatctgcctgaagatggcatgtgagttggatgatatggttggacgctggaagacgttgaagctggcgtctgtgagacctaccgcgtcacgcacgaaggaggcgtaggagtcgcgcagcttgttgaccagctcggcggtgacctgcacgtctagggcgcagtagtccagggtttccttgatgatgtcatacttatcctgtcccttttttttccacagctcgcggttgaggacaaactcttcgcggtctttccagtactcttggatcggaaacccgtcggcctccgaacggtaagagcctancatgtagaactggttgacggcctggtaggcgcagcatcccttttctacgggtagcgcgtatgcctgcgcggccttccggagcgaggtgtgggtgagcgcaaaggtgtccctaaccatgactttgaggtactggtatttgaagtcagtgtcgtcgcatccgccctgctcccagagcaaaaagtccgtgcgctttttggaacgcgggtttggcagggcgaaggtgacatcgttgaagagtatctttcccgcgcgaggcataaagttgcgtgtgatgcggaagggtcccggcacctcggaacggttgttaattacctgggcggcgagcacgatctcgtcaaagccgttgatgttgtggcccacaatgtaaagttccaagaagcgcgggatgcccttgatggaaggcaattttttaagttcctcgtaggtgagctcttcaggggagctgagcccgtgctctgaaagggcccagtctgcaagatgagggttggaagcgacgaatgagctccacaggtcacgggccattagcatttgcaggtggtcgcgaaaggtcctaaactggcgacctatggccattttttctggggtgatgcagtagaaggtaagcgggtcttgttcccagcggtcccatccaaggtccgcggctaggtctcgcgcggcggtcactagaggctcatctccgccgaacttcatgaccagcatgaagggcacgagctgcttcccaaaggcccccatccaagtataggtctctacatcgtaggtgacaaagagacgctcggtgcgaggatgcgagccgatcgggaagaactggatctcccgccaccagttggaggagtggctgttgatgtggtgaaagtagaagtccctgcgacgggccgaacactcgtgctggcttttgtaaaaacgtgcgcagtactggcagcggtgcacgggctgtacatcctgcacgaggttgacctgacgaccgcgcacaaggaagcagagtgggaatttgagcccctcgcctggcgggtttggctggtggtcttctacttcggctgcttgtccttgaccgtctggctgctcgaggggagttacggtggatcggaccaccacgccgcgcgagcccaaagtccagatgtccgcgcgcggcggtcggagcttgatgacaacatcgcgcagatgggagctgtccatggtctggagctcccgcggcgtcaggtcaggcgggagctcctgcaggtttacctcgcatagccgggtcagggcgcgggctaggtccaggtgatacctgatttccaggggctggttggtggcggcgtcgatggcttgcaagaggccgcatccccgcggcgcgactacggtaccgcgcggcgggcggtgggccgcgggggtgtccttggatgatgcatctaaaagcggtgacgcgggcgggcccccggaggtagggggggctcgggacccgccgggagagggggcaggggcacgtcggcgccgcgcgcgggcaggagctggtgctgcgcgcggaggttgctggcgaacgcgacgacgcggcggttgatctcctgaatctggcgcctctgcgtgaagacgacgggcccggtgagcttgaacctgaaagagagttcgacagaatcaatttcggtgtcgttgacggcggcctggcgcaaaatctcctgcacgtctcctgagttgtcttgataggcgatctcggccatgaactgctcgatctcttcctcctggagatctccgcgtccggctcgctccacggtggcggcgaggtcgttggagatgcgggccatgagctgcgagaaggcgttgaggcctccctcgttccagacgcggctgtagaccacgcccccttcggcatcgcgggcgcgcatgaccacctgcgcgagattgagctccacgtgccgggcgaagacggcgtagtttcgcaggcgctgaaagaggtagttgagggtggtggcggtgtgttctgccacgaagaagtacataacccagcgccgcaacgtggattcgttgatatcccccaaggcctcaaggcgctccatggcctcgtagaagtccacggcgaagttgaaaaactgggagttgcgcgccgacacggttaactcctcctccagaagacggatgagctcggcgacagtgtcgcgcacctcgcgctcaaaggctacaggggcctcttcttcttcttcaatctcctcttccataagggcctccccttcttcttcttctggcggcggtgggggaggggggacacggcggcgacgacggcgcaccgggaggcggtcgacaaagcgctcgatcatctccccgcggcgacggcgcatggtctcggtgacggcgcggccgttctcgcgggggcgcagttggaagacgccgcccgtcatgtcccggttatgggttggcggggggctgccgtgcggcagggatacggcgctaacgatgcatctcaacaattgttgtgtaggtactccgccaccgagggacctgagcgagtccgcatcgaccggatcggaaaacctctcgagaaaggcgtctaaccagtcacagtcgcaaggtaggctgagcaccgtggcgggcggcagcgggcggcggtcggggttgtttctggcggaggtgctgctgatgatgtaattaaagtaggcggtcttgagacggcggatggtcgacagaagcaccatgtccttgggtccggcctgctgaatgcgcaggcggtcggccatgccccaggcttcgttttgacatcggcgcaggtctttgtagtagtcttgcatgagcctttctaccggcacttcttcttctccttcctcttgtcctgcatctcttgcatctatcgctgcggcggcggcggagtttggccgtaggtggcgccctcttcctcccatgcgtgtgaccccgaagcccctcatcggctgaagcagggccaggtcggcgacaacgcgctcggctaatatggcctgctgcacctgcgtgagggtagactggaagtcgtccatgtccacaaagcggtggtatgcgcccgtgttgatggtgtaagtgcagttggccataacggaccagttaacggtctggtgacccggctgcgagagctcggtgtacctgagacgcgagtaagcccttgagtcaaagacgtagtcgttgcaagtccgcaccaggtactggtatcccaccaaaaagtgcggcggcggctggcggtagaggggccagcgtagggtggccggggctccgggggcgaggtcttccaacataaggcgatgatatccgtagatgtacctggacatccaggtgatgccggcggcggtggtggaggcgcgcggaaagtcacggacgcggttccagatgttgcgcagcggcaaaaagtgctccatggtcgggacgctctggccggtcaggcgcgcgcagtcgttgacgctctagaccgtgcaaaaggagagcctgtaagcgggcactcttccgtggtctggtggataaattcgcaagggtatcatggcggacgaccggggttcgaaccccggatccggccgtccgccgtgatccatgcggttaccgcccgcgtgtcgaacccaggtgtgcgacgtcagacaacgggggagcgctccttttggcttccttccaggcgcggcggatgctgcgctagcttttttggccactggccgcgcgcggcgtaagcggttaggctggaaagcgaaagcattaagtggctcgctccctgtagccggagggttattttccaagggttgagtcgcgggacccccggttcgagtctcgggccggccggactgcggcgaacgggggtttgcctccccgtcatgcaagaccccgcttgcaaattcctccggaaacagggacgagccccttttttgcttttcccagatgcatccggtgctgcggcagatgcgcccccctcctcagcagcggcaagagcaagagcagcggcagacatgcagggcaccctcccctcctcctaccgcgtcaggaggggcgacatccgcggttgacgcggcagcagatggtgattacgaacccccgcggcgccgggcccggcactacctggacttggaggagggcgagggcctggcgcggctaggagcgccctctcctgagcggtacccaagggtgcagctgaagcgtgatacgcgtgaggcgtacgtgccgcggcagaacctgtttcgcgaccgcgagggagaggagcccgaggagatgcgggatcgaaagttccacgcagggcgcgagctgcggcatggcctgaatcgcgagcggttgctgcgcgaggaggactttgagcccgacgcgcgaaccgggattagtcccgcgcgcgcacacgtggcggccgccgacctggtaaccgcatacgagcagacggtgaaccaggagattaactttcaaaaaagctttaacaaccacgtgcgtacgcttgtggcgcgcgaggaggtggctataggactgatgcatctgtgggactttgtaagcgcgctggagcaaaacccaaatagcaagccgctcatggcgcagctgttccttatagtgcagcacagcagggacaacgaggcattcagggatgcgctgctaaacatagtagagcccgagggccgctggctgctcgatttgataaacatcctgcagagcatagtggtgcaggagcgcagcttgagcctggctgacaaggtggccgccatcaactattccatgcttagcctgggcaagttttacgcccgcaagatataccataccccttacgttcccatagacaaggaggtaaagatcgaggggttctacatgcgcatggcgctgaaggtgcttaccttgagcgacgacctgggcgtttatcgcaacgagcgcatccacaaggccgtgagcgtgagccggcggcgcgagctcagcgaccgcgagctgatgcacagcctgcaaagggccctggctggcacgggcagcggcgatagagaggccgagtcctactttgacgcgggcgctgacctgcgctgggccccaagccgacgcgccctggaggcagctggggccggacctgggctggcggtggcacccgcgcgcgctggcaacgtcggcggcgtggaggaatatgacgaggacgatgagtacgagccagaggacggcgagtactaagcggtgatgtttctgatcagtcgcggccgcgatatcgctagcgaagttcctattctctagaaagtataggaacttcggatcctctagagtcgaaaaaaaaaaagcatgatgcaaaataaaaaactcaccaaggccatggcaccgagcgttggttttcttgtattccccttagtatgcggcgcgcggcgatgtatgaggaaggtcctcctccctcctacgagagtgtggtgagcgcggcgccagtggcggcggcgctgggttctcccttcgatgctcccctggacccgccgtttgtgcctccgcggtacctgcggcctaccggggggagaaacagcatccgttactctgagttggcacccctattcgacaccacccgtgtgtacctggtggacaacaagtcaacggatgtggcatccctgaactaccagaacgaccacagcaactttctgaccacggtcattcaaaacaatgactacagcccgggggaggcaagcacacagaccatcaatcttgacgaccggtcgcactggggcggcgacctgaaaaccatcctgcataccaacatgccaaatgtgaacgagttcatgtttaccaataagtttaaggcgcgggtgatggtgtcgcgcttgcctactaaggacaatcaggtggagctgaaatacgagtgggtggagttcacgctgcccgagggcaactactccgagaccatgaccatagaccttatgaacaacgcgatcgtggagcactacttgaaagtgggcagacagaacggggttctggaaagcgacatcggggtaaagtttgacacccgcaacttcagactggggtttgaccccgtcactggtcttgtcatgcctggggtatatacaaacgaagccttccatccagacatcattttgctgccaggatgcggggtggacttcacccacagccgcctgagcaacttgttgggcatccgcaagcggcaacccttccaggagggctttaggatcacctacgatgatctggagggtggtaacattcccgcactgttggatgtggacgcctaccaggcgagcttgaaagatgacaccgaacagggcgggggtggcgcaggcggcagcaacagcagtggcagcggcgcggaagagaactccaacgcggcagccgcggcaatgcagccggtggaggacatgaacgatcatgccattcgcggcgacacctttgccacacgggctgaggagaagcgcgctgaggccgaagcagcggccgaagctgccgcccccgctgcgcaacccgaggtcgagaagcctcagaagaaaccggtgatcaaacccctgacagaggacagcaagaaacgcagttacaacctaataagcaatgacagcaccttcacccagtaccgcagctggtaccttgcatacaactacggcgaccctcagaccggaatccgctcatggaccctgctttgcactcctgacgtaacctgcggctcggagcaggtctactggtcgttgccagacatgatgcaagaccccgtgaccttccgctccacgcgccagatcagcaactttccggtggtgggcgccgagctgttgcccgtgcactccaagagcttctacaacgaccaggccgtctactcccaactcatccgccagtttacctctctgacccacgtgttcaatcgctttcccgagaaccagattttggcgcgcccgccagcccccaccatcaccaccgtcagtgaaaacgttcctgctctcacagatcacgggacgctaccgctgcgcaacagcatcggaggagtccagcgagtgaccattactgacgccagacgccgcacctgcccctacgtttacaaggccctgggcatagtctcgccgcgcgtcctatcgagccgcactttttgagcaagcatgtccatccttatatcgcccagcaataacacaggctggggcctgcgcttcccaagcaagatgtttggcggggccaagaagcgctccgaccaacacccagtgcgcgtgcgcgggcactaccgcgcgccctggggcgcgcacaaacgcggccgcactgggcgcaccaccgtcgatgacgccatcgacgcggtggtggaggaggcgcgcaactacacgcccacgccgccgccagtgtccaccgtggacgcggccattcagaccgtggtgcgcggagcccggcgctacgctaaaatgaagagacggcggaggcgcgtagcacgtcgccaccgccgccgacccggcactgccgcccaacgcgcggcggcggccctgcttaaccgcgcacgtcgcaccggccgacgggcggccatgcgagccgctcgaaggctggccgcgggtattgtcactgtgccccccaggtccaggcgacgagcggccgccgcagcagccgcggccattagtgttatgactcagggtcgcaggggcaacgtgtactgggtgcgcgactcggttagcggcctgcgcgtgcccgtgcgcacccgccccccgcgcaactagattgcaataaaaaactacttagactcgtactgttgtatgtatccagcggcggcggcgcgcatcgaagctatgtccaagcgcaaaatcaaagaagagatgctccaggtcatcgcgccggagatctatggccccccgaagaaggaagagcaggattacaagccccgaaagctaaagcgggtcaaaaagaaaaagaaagatgatgatgatgatgaacttgacgacgaggtggaactgttgcacgcgaccgcgcccaggcgacgggtacagtggaaaggtcgacgcgtaagacgtgttttgcgacccggcaccaccgtagtctttacgcccggtgagcgctccacccgcacctacaagcgcgtgtatgatgaggtgtacggcgacgaggacctgcttgagcaggccaacgagcgcctcggggagtttgcctacggaaagcggcataaggacatgctggcgttgccgctggacgagggcaacccaacacctagcctaaagcccgtgacactgcagcaggtgctgcccgcgcttgcaccgtccgaagaaaagcgcggcctaaagcgcgagtctggtgacttggcacccaccgtgcagctgatggtacccaagcgtcagcgactggaagatgtcttggaaaaaatgaccgtggagcctgggctggagcccgaggtccgcgtgcggccaatcaagcaggtggcaccgggactgggcgtgcagaccgtggacgttcagatacccaccaccagtagcactagtattgccactgccacagagggcatggagacacaaacgtccccggttgcctcggcggtggcagatgccgcggtgcaggcggccgctgcggccgcgtccaagacctctacggaggtgcaaacggacccgtggatgtttcgtgtttcagccccccggcgtccgcgccgttcaaggaagtacggcgccgccagcgcgctactgcccgaatatgccctacatccttccatcgcgcctacccccggctatcgtggctacacctaccgccccagaagacgagcaactacccgacgccgaaccaccactggaacccgccgccgccgtcgccgtcgccagcccgtgctggccccgatttccgtgcgcagggtggctcgcgaaggaggcaggaccctggtgctgccaacagcgcgctaccaccccagcatcgtttaaaagccggtctttgtggttcttgcagatatggccctcacctgccgcctccgtttcccggtgccgggattccgaggaagaatgcaccgtaggaggggcatggccggccacggcctgacgggcggcatgcgtcgtgcgcaccaccggcggcggcgcgcgtcgcaccgtcgcatgcgcgccggtatcctgcccctccttattccactgatcgccgcggcgattggcgccgtgcccggaattgcatccgtggccttgcaggcgcagagacactgattaaaaacaagttacatgtggaaaaatcaaaataaaagtctggactctcacgctcgcttggtcctgtaactattttgtagaatggaagacatcaactttgcgtcactggccccgcgacacggctcgcgcccgttcatgggaaactggcaagatatcggcaccagcaatatgagcggtggcgccttcagctggggctcgctgtggagcggcattaaaaatttcggttccgccgttaagaactatggcagcaaagcctggaacagcagcacaggccagatgctgagggacaagttgaaagagcaaaatttccaacaaaaggtggtagatggcctggcctctggcattagcggggtggtggacctggccaaccaggcagtgcaaaataagattaacagtaagcttgatccccgccctcccgtagaggagcctccaccggccgtggagacagtgtctccagaggggcgtggcgaaaagcgtccgcgacccgacagggaagaaactctggtgacgcaaatagacgagcctccctcgtacgaggaggcactaaagcaaggcctgcccaccacccgtcccatcgcgcccatggctaccggagtgctgggccagcacacacccgtaacgctggacctgcctccccccgccgacacccagcagaaacctgtgctgccaggcccgtccgccgttgttgtaacccgtcctagccgcgggtccctgcgccgcgccgccagcggtccgcgatcgttgcggcccgtagccagtggcaactggcaaagcacactgaacagcatcgtgggtctgggggtgcaatccctgaagcgccgacgatgcttctgatcgcggccgcgatatcgctagcgaagttcctattctctagaaagtataggaacttctcgatcgagcacgtgttgacaattaatcatcggcatagtatatcggcatagtataatacgacaaggtgaggaactaaaccatggccaagttgaccagtgccgttccggtgctcaccgcgcgcgacgtcgccggagcggtcgagttctggaccgaccggctcgggttctcccgggacttcgtggaggacgacttcgccggtgtggtccgggacgacgtgaccctgttcatcagcgcggtccaggaccaggtggtgccggacaacaccctggcctgggtgtgggtgcgcggcctggacgagctgtacgccgagtggtcggaggtcgtgtccacgaacttccgggacgcctccgggccggccatgaccgagatcggcgagcagccgtgggggcgggagttcgccctgcgcgacccggccggcaactgcgtgcacttcgtggccgaggagcaggactgagaattcgaagttcctattctctagaaagtataggaacttcggatcctctagagtcgatagctaacgtgtcgtatgtgtgtcatgtatgcgtccatgtcgccgccagaggagctgctgagccgccgcgcgcccgctttccaagatggctaccccttcgatgatgccgcagtggtcttacatgcacatctcgggccaggacgcctcggagtacctgagccccgggctggtgcagtttgcccgcgccaccgagacgtacttcagcctgaataacaagtttagaaaccccacggtggcgcctacgcacgacgtgaccacagaccggtcccagcgtttgacgctgcggttcatccctgtggaccgtgaggatactgcgtactcgtacaaggcgcggttcaccctagctgtgggtgataaccgtgtgctggacatggcttccacgtactttgacatccgcggcgtgctggacaggggccccacttttaagccctactccggcactgcctacaacgccctagctcccaagggtgcccccaactcatgcgagtgggatgaagatgatactcaggtacaggtagcggctgaagacgatcaagacgacgacgaagaagaggaacaactacctcagcagagaaatggcaaaaaaactcacgtatatgctcaggcaccgtttgctggcgaagcaattaacaaaaacggcctgcagataggaactaacggtgcagccactgaaggaaataaggaaatttacgcagataaaacttatcaacctgaaccacaaataggagaatcacagtggaacgaagccgaatcgtccgtagcaggtggaagggttcttaaaaagactactcccatgaaaccatgctatggctcctatgccagacctaccaattctaacggaggtcagggcgttatggttgaacaaaatggtaaattggaaagtcaagtagaaatgcaatttttttcaacttctgtaaatgctatgaacgaggcaaacgctattcaacctaaactagtgttgtatagtgaagatgtaaatatggaaaccccagacactcatctttcttataagcctggaaaaagtgatgataattctaaggcaatgttgggtcaacaatctatgccaaacagacccaattacatagctttcagggacaattttattggcctaatgtattacaacagcactggtaacatgggtgttcttgctggtcaggcatcacagctaaatgctgtcgtagatttgcaagacagaaacacagagctgtcctaccaacttttgcttgattctattggtgatcgaaccagatacttttccatgtggaatcaggctgtagacagctacgatccagatgttagaattatcgagaaccatggaactgaggatgaattgccaaattattgttttcctcttggcggaattggggtgacggacacctatcaagctattaaggctacaaatggaaatggaggcgccactacctgggctcaggacaatacttttgcagaacgaaatgaaataggggtgggaaataactttgccatggaaattaacctgaatgccaacctatggagaaatttcctttactccaatattgcgctgtacctgccagacaagctaaaatacaaccccaccaatgtggaaatatctgacaatcccaacacctacgactacatgaacaagcgagtggtggctcccgggctggtggattgctacattaaccttggggcgcgctggtctctggactacatggacaacgttaatccctttaaccaccaccgcaatgcgggcctgcgttaccgctccatgttgttgggaaacggccgctacgtgccctttcacattcaggtgccccaaaagttttttgccattaaaaacctcctcctcctgccaggctcatacacatatgaatggaacttcaggaaggatgttaacatggttctgcagagctctctgggaaacgaccttagagttgacggggctagcattaagtttgacagcatttgtctttacgccaccttcttccccatggcccacaacacggcctccacgctggaagccatgctcagaaatgacaccaacgaccagtcctttaatgactacctttccgccgccaacatgctatatcccatacccgccaacgccaccaacgtgcccatctccatcccatcgcgcaactgggcagcatttcgcggttgggccttcacacgcttgaagacaaaggaaaccccttccctgggatcaggctacgacccttactacacctactctggctccataccataccttgacggaaccttctatcttaatcacacctttaagaaggtggccattacttttgactcttctgttagctggccgggcaacgaccgcctgcttactcccaatgagtttgagattaagcgctcagttgacggggagggctataacgtagctcagtgcaacatgacaaaggactggttcctagtgcagatgttggccaactacaatattggctaccagggcttctacattccagaaagctacaaagaccgcatgtactcgttcttcagaaacttccagcccatgagccggcaagtggtggacgatactaaatacaaagattatcagcaggttggaattatccaccagcataacaactcaggcttcgtaggctacctcgctcccaccatgcgcgagggacaagcttaccccgctaatgttccctacccactaataggcaaaaccgcggttgatagtattacccagaaaaagtttctttgcgaccgcaccctgtggcgcatccccttctccagtaactttatgtccatgggtgcgctcacagacctgggccaaaaccttctctacgcaaactccgcccacgcgctagacatgacctttgaggtggatcccatggacgagcccacccttctttatgttttgtttgaagtctttgacgtggtccgtgtgcaccagccgcaccgcggcgtcatcgagaccgtgtacctgcgcacgcccttctcggccggcaacgccacaacataaagaagcaagcaacatcaacaacagctgccgccatgggctccagtgagcaggaactgaaagccattgtcaaagatcttggttgtgggccatattttttgggcacctatgacaagcgcttcccaggctttgtttccccacacaagctcgcctgcgccatagttaacacggccggtcgcgagactgggggcgtacactggatggcctttgcctggaacccgcgctcaaaaacatgctacctctttgagccctttggcttttctgaccaacgtctcaagcaggtttaccagtttgagtacgagtcactcctgcgccgtagcgccattgcctcttcccccgaccgctgtataacgctggaaaagtccacccaaagcgtgcaggggcccaactcggccgcctgtggcctattctgctgcatgtttctccacgcctttgccaactggccccaaactcccatggatcacaaccccaccatgaaccttattaccggggtacccaactccatgcttaacagtccccaggtacagcccaccctgcgccgcaaccaggaacagctctacagcttcctggagcgccactcgccctacttccgcagccacagtgcgcaaattaggagcgccacttctttttgtcacttgaaaaacatgtaaaaataatgtactaggagacactttcaataaaggcaaatgtttttatttgtacactctcgggtgattatttacccccacccttgccgtctgcgccgtttaaaaatcaaaggggttctgccgcgcatcgctatgcgccactggcagggacacgttgcgatactggtgtttagtgctccacttaaactcaggcacaaccatccgcggcagctcggtgaagttttcactccacaggctgcgcaccatcaccaacgcgtttagcaggtcgggcgccgatatcttgaagtcgcagttggggcctccgccctgcgcgcgcgagttgcgatacacagggttacagcactggaacactatcagcgccgggtggtgcacgctggccagcacgctcttgtcggagatcanatccgcgtccaggtcctccgcgttgctcagggcgaacggagtcaactttggtagctgccttcccaaaaagggtgcatgcccaggctttgagttgcactcgcaccgtagtggcatcagaaggtgaccgtgcccagtctgggcgttaggatacagcgcctgcatgaaagccttgatctgcttaaaagccacctgagcctttgcgccttcagagaagaacatgccgcaagacttgccggaaaactgattggccggacaggccgcgtcatgcacgcagcaccttgcgtcggtgttggagatctgcaccacatttcggccccaccggttcttcacgatcttggccttgctagactgctccttcagcgcgcgctgcccgttttcgctcgtcacatccatttcaatcacgtgctccttatttatcataatgctcccgtgtagacacttaagctcgccttcgatctcagcgcagcggtgcagccacaacgcgcagcccgtgggctcgtggtgcttgtaggttacctctgcaaacgactgcaggtacgcctgcaggaatcgccccatcatcgtcacaaaggtcttgttgctggtgaaggtcagctgcaacccgcggtgctcctcgtttagccaggtcttgcatacggccgccagagcttccacttggtcaggcagtagcttgaagtttgcctttagatcgttatccacgtggtacttgtccatcaacgcgcgcgcagcctccatgcccttctcccacgcagacacgatcggcaggctcagcgggtttatcaccgtgctttcactttccgcttcactggactcttccttttcctcttgcatccgcataccccgcgccactgggtcgtcttcattcagccgccgcaccgtgcgcttacctcccttgccgtgcttgattagcaccggtgggttgctgaaacccaccatttgtagcgccacatcttctctttcttcctcgctgtccacgatcacctctggggatggcgggcgctcgggcttgggagaggggcgcttctttttctttttggacgcaatggccaaatccgccgtcgaggtcgatggccgcgggctgggtgtgcgcggcaccagcgcatcttgtgacgagtcttcttcgtcctcggactcgagacgccgcctcagccgcttttttgggggcgcgcggggaggcggcggcgacggcgacggggacgagacgtcctccatggttggtggacgtcgcgccgcaccgcgtccgcgctcgggggtggtttcgcgctgctcctcttcccgactggccatttccttctcctataggcagaaaaagatcatggagtcagtcgagaaggaggacagcctaaccgccccctttgagttcgccaccaccgcctccaccgatgccgccaacgcgcctaccaccttccccgtcgaggcacccccgcttgaggaggaggaagtgattatcgagcaggacccaggttttgtaagcgaagacgacgaagatcgctcagtaccaacagaggataaaaagcaagaccaggacgacgcagaggcaaacgaggaacaagtcgggcggggggaccaaaggcatggcgactacctagatgtgggagacgacgtgctgttgaagcatctgcagcgccagtgcgccattatctgcgacgcgttgcaagagcgcagcgatgtgcccctcgccatagcggatgtcagccttgcctacgaacgccacctgttctcaccgcgcgtaccccccaaacgccaagaaaacggcacatgcgagcccaacccgcgcctcaacttctaccccgtatttgccgtgccagaggtgcttgccacctatcacatctttttccaaaactgcaagatacccctatcctgccgtgccaaccgcagccgagcggacaagcagctggccttgcggcagggcgctgtcatacctgatatcgcctcgctcgacgaagtgccaaaaatctttgagggtcttggacgcgacgagaagcgcgcggcaaacgctctgcaacaagaaaacagcgaaaatgaaagtcactgtggagtgctggtggaacttgagggtgacaacgcgcgcctagccgtgctgaaacgcagcatcgaggtcacccactttgcctacccggcacttaacctaccccccaaggttatgagcacagtcatgagcgagctgatcgtgcgccgtgcacgacccctggagagggatgcaaacttgcaagaacaaaccgaggagggcctacccgcagttggcgatgagcagctggcgcgctggcttgagacgcgcgagcctgccgacttggaggagcgacgcaagctaatgatggccgcagtgcttgttaccgtggagcttgagtgcatgcagcggttctttgctgacccggagatgcagcgcaagctagaggaaacgttgcactacacctttcgccagggctacgtgcgccaggcctgcaaaatttccaacgtggagctctgcaacctggtctcctaccttggaattttgcacgaaaaccgccttgggcaaaacgtgcttcattccacgctcaagggcgaggcgcgccgcgactacgtccgcgactgcgtttacttatttctgtgctacacctggcaaacggccatgggcgtgtggcagcagtgcctggaggagcgcaacctgaaggagctgcagaagctgctaaagcaaaacttgaaggacctatggacggccttcaacgagcgctccgtggccgcgcacctggcggacattatcttccccgaacgcctgcttaaaaccctgcaacagggtctgccagacttcaccagtcaaagcatgttgcaaaactttaggaactttatcctagagcgttcaggaattctgcccgccacctgctgtgcgcttcctagcgactttgtgcccattaagtaccgtgaatgccctccgccgctttggggtcactgctaccttntgcagctagccaactaccttgcctaccactccgacatcatggaagacgtgagcggtgacggcctactggagtgtcactgtcgctgcaacctatgcaccccgcaccgctccctggtctgcaattcacaactgcttagcgaaagtcaaattatcggtacctttgagctgcagggtccctcgcctgacgaaaagtccgcggctccggggttgaaactcactccggggctgtggacgtcggcttaccttcgcaaatttgtacctgaggactaccacgcccacgagattaggttctacgaagaccaatcccgcccgccaaatgcggagcttaccgcctgcgtcattacccagggccacatccttggccaattgcaagccattaacaaagcccgccaagagtttctgctacgaaagggacggggggtttacttggacccccagtccggcgaggagctcaacccaatccccccgccgccgcagccctatcagcagccgcgggcccttgcttcccaggatggcacccaaaaagaagctgcagctgccgccgccgccacccacggacgaggaggaatactgggacagtcaggcagaggaggttttggacgaggaggaggagatgatggaagactgggacagcctagacgaggaagcttccgaggccgaagaggtgtcagacgaaacaccgtcaccctcggtcgcattcccctcgccggcgccccagaaatcggcaaccgttcccagcattgctacaacctccgctcctcaggcgccgccggcactgcccgttcgccgacccaaccgtagatgggacaccactggaaccagggccggtaagtctaagcagccgccgccgttagcccaagagcaacaacagcgccaaggctaccgctcgtggcgcgtgcacaagaacgccatagttgcttgcttgcaagactgtgggggcaacatctccttcgcccgccgctttcttctctaccatcacggcgtggccttcccccgtaacatcctgcattactaccgtcatctctacagcccctactgcaccggcggcagcggcagcaacagcagcggccacgcagaagcaaaggcgaccggatagcaagactctgacaaagcccaagaaatccacagcggcggcagcagcaggaggaggagcactgcgtctggcgcccaacgaacccgtatcgacccgcgagcttagaaacaggatttttcccactctgtatgctatatttcaacagagcaggggccaagaacaagagctgaaaataaaaaacaggtctctgcgctccctcacccgcagctgcctgtatcacaaaagcgaagatcagcttcggcgcacgctggaagacgcggaggctctcttcagcaaatactgcgcgctgactcttaaggactagtttcgcgccctttctcaaatttaagcgcgaaaactacgtcatctccagcggccacacccggcgccagcacctgtcgtcagcgccattatgagcaaggaaattcccacgccctacatgtggagttaccagccacaaatgggacttgcggctggagctgcccaagactactcaacccgaataaactacatgagcgcgggaccccacatgatatcccgggtcaacggaatccgcgcccaccgaaaccgaattctcctcgaacaggcggctattaccaccacacctcgtaataaccttaatccccgtagttggcccgctgccctggtgtaccaggaaagtcccgctcccaccactgtggtacttcccagagacgcccaggccgaagttcagatgactaactcaggggcgcagcttgcgggcggctttcgtcacagggtgcggtcgcccgggcagggtataactcacctgaaaatcagagggcgaggtattcagctcaacgacgagtcggtgagctcctctcttggtctccgtccggacgggacatttcagatcggcggcgctggccgctcttcatttacgccccgtcaggcgatcctaactctgcagacctcgtcctcggagccgcgctccggaggcattggaactctacaatttattgaggagttcgtgccttcggtttacttcaaccccttttctggacctcccggccactacccggaccagtttattcccaactttgacgcggtaaaagactcggcggacggctacgactgacagatctgagctcgcggccgcgatatcgctagcgaagttcctattctctagaaagtataggaacttcgatcctctagagtcgacctgcaggcatgcaagcttggcactgcaataaattacttacttaaaatcagtcagcaaatctttgtccagcttattcagcatcacctcctttccctcctcccaactctggtatttcagcagccttttagctgcgaactttctccaaagtctaaatgggatgtcaaattcctcatgttcttgtccctccgcacccactatcttcatattgttgcagatgaaacgcgccagaccgtctgaagacaccttcaaccctgtgtacccatatgacacggaaaccggccctccaactgtgcctttccttacccctccctttgtgtcgccaaatgggttccaagaaagtccccccggagtgctttctttgcgtctttcagaacctttggttacctcacacggcatgcttgcgctaaaaatgggcagcggcctgtccctggatcaggcaggcaaccttacatcaaatacaatcactgtttctcaaccgctaaaaaaaacaaagtccaatataactttggaaacatccgcgccccttacagtcagctcaggcgccctaaccatggccacaacttcgcctttggtggtctctgacaacactcttaccatgcaatcacaagcaccgctaaccgtgcaagactcaaaacttagcattgctaccaaagagccacttacagtgttagatggaaaactggccctgcagacatcagcccccctctctgccactgataacaacgccctcactatcactgcctcacctcctcttactactgcaaatggtagtctggctgttaccatggaaaacccactttacaacaacaatggaaaacttgggctcaaaattggcggtcctttgcaagtggccaccgactcacatgcactaacactaggtactggtcagggggttgcagttcataacaatttgctacatacaaaagttacaggcgcaatagggtttgatacatctggcaacatggaacttaaaactggagatggcctctatgtggatagcgccggtcctaaccaaaaactacatattaatctaaataccacaaaaggccttgcttttgacaacaccgcaataacaattaacgctggaaaagggttggaatttgaaacagactcctcaaacggaaatcccataaaaacaaaaattggatcaggcatacaatataataccaatggagctatggttgcaaaacttggaacaggcctcagttttgacagctccggagccataacaatgggcagcataaacaatgacagacttactctttggacaacaccagacccatccccaaattgcagaattgcttcagataaagactgcaagctaactctggcgctaacaaaatgtggcagtcaaattttgggcactgtttcagctttggcagtatcaggtaatatggcctccatcaatggaactctaagcagtgtaaacttggttcttagatttgatgacaacggagtgcttatgtcaaattcatcactggacaaacagtattggaactttagaaacggggactccactaacggtcaaccatacacttatgctgttgggtttatgccaaacctaaaagcttacccaaaaactcaaagtaaaactgcaaaaagtaatattgttagccaggtgtatcttaatggtgacaagtctaaaccattgcattttactattacgctaaatggaacagatgaaaccaaccaagtaagcaaatactcaatatcattcagttggtcctggaacagtggacaatacactaatgacaaatttgccaccaattcctataccttctcctacattgcccaggaataaagaatcgtgaacctgttgcatgttatgtttcaacgtgtttatttttcaattcgtattagtcatcgctattaccatggtgatgcggttttggcagtacatcaatgggcgtggatagcggtttgactcacggggatttccaagtctccaccccattgacgtcaatgggagtttgttttggcaccaaaatcaacgggactttccaaaatgtcgtaacaactccgccccattgacgcaaatgggcggtaggcgtgtacggtgggaggtctatataagcagagctggtttagtgaaccgtcagatccgctagagatccaccatgtttgtctttctcgtgctgctgcccctcgtgagcagccagtgcgtcaatctgacaacaaggacccagctgccccccgcctacaccaactccttcacaagaggcgtgtattaccccgataaggtcttcagatccagcgtcctccacagcacccaagatttgtttctgcctttcttcagcaacgtgacatggttccacgccattcatgtcagcggcacaaacggcacaaagaggtttgacaaccccgtgctccccttcaacgacggcgtgtacttcgccagcacagagaaatccaatatcattaggggctggatcttcggcacaacactggattccaagacccagtctctgctcattgtgaataacgccaccaacgtggtgattaaggtctgtgagtttcagttctgcaacgacccctttctgggagtctactaccacaagaataataagagctggatggagtccgagtttagggtgtacagctccgccaacaactgtaccttcgaatacgtgtcccagcctttcctcatggatctggagggcaagcaaggcaatttcaaaaatctgagagagttcgtgttcaaaaacattgatggatacttcaaaatctacagcaagcatacccccattaatctggtgagggatctgccccaaggattctccgctctggaacctctggtggatctgcccattggcattaacatcacaagattccagaccctcctcgccctccatagatcctatctgacccccggcgactcctccagcggatggacagccggagctgccgcctactacgtgggctatctgcagccaagaacctttctgctgaagtacaacgagaacggcaccatcacagacgctgtcgattgcgctctcgaccctctgagcgagaccaaatgcacactgaagagcttcaccgtggaaaagggcatctatcagaccagcaacttcagagtgcagcctaccgagagcattgtgaggtttcccaacatcaccaatctgtgtcctttcggcgaggtctttaatgccacaaggttcgcttccgtgtatgcttggaataggaagaggatcagcaattgcgtcgccgactattccgtcctctataacagcgcctccttctccaccttcaaatgttatggcgtgtcccccaccaagctcaacgacctctgcttcaccaatgtgtacgctgactccttcgtcattaggggcgacgaggtgaggcaaattgcccccggccagaccggcaagattgctgattacaactacaaactgcccgacgattttaccggctgcgtgatcgcttggaactccaacaatctggactccaaagtgggcggaaactacaattacctctacagactctttagaaaaagcaatctgaagcccttcgagagagacatctccaccgaaatctaccaagccggaagcacaccttgcaatggcgtcgagggatttaactgctacttccctctgcagagctacggctttcaacctaccaacggcgtcggatatcaaccctatagggtggtcgtgctgagctttgaactgctgcatgctcccgccaccgtctgcggacctaagaagagcaccaatctcgtcaaaaacaagtgcgtgaacttcaacttcaatggactgaccggcaccggcgtgctgaccgagagcaataagaagtttctgcccttccagcagttcggaagggatattgccgataccacagatgctgtgagggacccccaaaccctcgagattctggatatcaccccttgcagcttcggaggagtgtccgtgatcacccccggaacaaacacctccaatcaagtggctgtgctgtaccaagacgtgaactgcacagaagtccccgtggccatccatgccgaccagctgacccctacatggagagtgtactccaccggcagcaatgtgttccagacaagagccggatgcctcattggagctgaacacgtcaacaacagctacgagtgcgacattcccatcggcgccggcatttgtgcctcctatcagacccagaccaacagcccaagaagggctagaagcgtcgcttcccaatccatcattgcctacaccatgtctctgggagccgaaaactccgtcgcctactccaacaatagcatcgccatccccaccaattttaccatctccgtgaccacagagattctgcccgtgtccatgacaaagacatccgtggactgcaccatgtacatctgtggcgacagcaccgagtgtagcaatctgctgctgcaatatggcagcttctgcacccagctgaacagagccctcaccggcatcgccgtcgaacaagacaagaacacccaagaggtgttcgcccaagtgaagcaaatctacaagaccccccctatcaaagatttcggaggattcaactttagccagattctgcccgatcctagcaagccttccaagaggagcttcatcgaggatctgctgtttaataaggtgacactggccgacgctggcttcattaaacagtacggcgattgtctgggcgacatcgctgctagggatctgatctgcgctcagaagttcaacggactgacagtcctccctcctctgctgaccgacgagatgatcgctcagtataccagcgctctgctggctggaaccattaccagcggctggacattcggcgctggagccgccctccaaattccctttgccatgcagatggcctatagattcaacggcattggcgtcacccaaaatgtgctgtatgaaaatcagaagctgattgctaaccaattcaatagcgccattggcaagatccaagactctctgagctccacagccagcgccctcggaaagctgcaagacgtggtgaatcaaaacgcccaagctctgaacacactggtgaaacagctcagcagcaactttggagccatcagcagcgtgctcaatgatatcctctctaggctggacaaagtggaggccgaagtccagatcgatagactcatcaccggcagactccaatctctgcagacatacgtcacccaacagctcattagagctgccgaaatcagagcctccgccaatctggccgccaccaagatgtccgagtgcgtgctgggacagagcaagagagtggacttctgtggcaagggataccatctgatgagcttcccccagagcgctccccatggagtggtctttctgcatgtcacatacgtgcccgcccaagagaagaacttcaccaccgctcccgccatttgccacgatggaaaggcccactttcccagagaaggagtgttcgtgagcaacggcacacactggtttgtcacccagagaaatttttacgagccccagattatcaccaccgacaacaccttcgtgtccggaaactgcgatgtcgtgattggcatcgtgaacaacacagtctacgaccctctgcagcccgaactcgacagcttcaaggaagagctggacaagtacttcaagaatcacacatcccccgacgtggatctgggcgacattagcggcattaatgcctccgtcgtcaacattcagaaggagattgatagactgaatgaagtcgccaagaacctcaatgagtctctgattgatctgcaagagctgggcaagtacgagcaatacatcaaatggccttggtacatctggctgggattcatcgctggactcatcgccatcgtgatggtcaccattatgctgtgttgcatgaccagctgctgcagctgtctgaagggctgctgcagctgcggaagctgctgcaagtttgacgaagacgactccgagcccgtgctgaagggcgtcaagctgcattatacataaactagtgctggaattcgcccttatagagtgctggaattcgcccttatagagtgctggaattcgcccttatatctagtaacggccgccagtgtgctggaattcgcccttataacttcgtatagcatacattatacgaagttataagggcgaattctgcagatatccatcctttaaaaaacctcccacacctccccctgaacctgaaacataaaatgaatgcaattgttgttgttaacttgtttattgcagcttataatggttacaaataaagcaatagcatcacaaatttcacaaataaagcatttttttcactgcattctagttgtggtttgtccaaactcatcaatgtatcttaacaacgtgtttatttttcaattgcagaaagaattgcagaaaatttcaagtcatttttcattcagtagtatagccccaccaccacatagcttatactaatcaccgtaccttaatcaaactcacagaaccctagtattcaacctgccacctccctcccaacacacagagtacacagtcctttctccccggctggccttaaacagcatcatatcatgggtaacagacatattcttaggtgttatattccacacggtctcctgtcgagccaaacgctcatcagtgatgttaataaactccccgggcagctcgcttaagttcatgtcgctgtccagctgctgagccacaggctgctgtccaacttgcggttgctcaacgggcggcgaaggagaagtccacgcctacatgggggtagagtcataatcgtgcatcaggatagggcggtggtgctgcagcagcgcgcgaataaactgctgccgccgccgctccgtcctgcaggaatacaacatggcagtggtctcctcagcgatgattcgcaccgcccgcagcataaggcgccttgtcctccgggcacagcagcgcaccctgatctcacttaagtcagcacagtaactgcagcacagtaccacaatattgtttaaaatcccacagtgcaaggcgctgtatccaaagctcatggcggggaccacagaacccacgtggccatcataccacaagcgcaggtagattaagtggcgacccctcataaacacgctggacataaacattacctcttttggcatgttgtaattcaccacctcccggtaccatataaacctctgattaaacatggcgccatccaccaccatcctaaaccagctggccaaaacctgcccgccggctatgcactgcagggaaccgggactggaacaatgacagtggagagcccaggactcgtaaccatggatcatcatgctcgtcatgatatcaatgttggcacaacacaggcacacgtgcatacacttcctcaggattacaagctcctcccgcgtcagaaccatatcccagggaacaacccattcctgaatcagcgtaaatcccacactgcagggaagacctcgcacgtaactcacgttgtgcattgtcaaagtgttacattcgggcagcagcggatgatcctccagtatggtagcgcgtgtctctgtctcaaaaggaggtaggcgatccctactgtacggagtgcgccgagacaaccgagatcgtgttggtcgtagtgtcatgccaaatggaacgccggacgtagtcatatttcctgaagcaaaaccaggtgcgggcgtgacaaacagatctgcgtctccggtctcgtcgcttagctcgctctgtgtagtagttgtagtatatccactctctcaaagcatccaggcgccccctggcttcgggttctatgtaaactccttcatgcgccgctgccctgataacatccaccaccgcagaataagccacacccagccaacctacacattcgttctgcgagtcacacacgggaggagcgggaagagctggaagaaccatgttttttttttttattccaaaagattatccaaaacctcaaaatgaagatctattaagtgaacgcgctcccctccggtggcgtggtcaaactctacagccaaagaacagataatggcatttgtaagatgttgcacaatggcttccaaaaggcaaactgccctcacgtccaagtggacgtaaaggctaaacccttcanggtgaatctcctctataaacattccagcaccttcaaccatgcccaaataattttcatctcgccaccttatcaatatgtctctaagcaaatcccgaatattaagtccggccattgtaaaaatctgctccagagcgccctccaccttcagcctcaagcagcgaatcatgattgcaaaaattcaggttcctcacagacctgtataagattcaaaagcggaacattaacaaaaataccgcgatcccgtaggtcccttcgcagggccagctgaacataatcgtgcaggtctgcacggaccagcgcggccacttccccgccaggaaccatgacaaaagaacccacactgattatgacacgcatactcggagctatgctaaccagcgtagccccgatgtaagcttgttgcatgggcggcgatataaaatgcaaggtactgctcaaaaaatcaggcaaagcctcgcgcaaaaaagcaagcacatcgtagtcatgctcatgcagataaaggcaggtaagttccggaaccaccacagaaaaagacaccatttttctctcaaacatgtctgcgggttcctgcataaacacaaaataaaataacaaaaaaaaaaaaacatttaaacattagaagcctgtcttacaacaggaaaaacaacccttataagcataagacggactacggccatgccggcgtgaccgtaaaaaaactggtcaccgtgattaaaaagcaccaccgacagttcctcggtcatgtccggagtcataatgtaagactcggtaaacacatcaggttggttaacatcggtcagtgctaaaaagcgaccgaaatagcccgggggaatacatacccgcaggcgtagagacaacattacagcccccataggaggtataacaaaattaataggagagaaaaacacataaacccctgaaaaaccctcctgcccctaggcaaaatagcaccctcccgctccagaacaacatacagcgcttccacagcggcagccataacagtcagccttaccagtaaaaaaacctattaaaaaacaccactcgacacggcaccagctcaatcagtcacagtgtaaaaagggccaagtacagagcgagtatatataggactaaaaaatgacgtaacggttaaagtccacaaaaaccacccagaaaaccgcacgcgaacctacgcccagaaacgaaagccaaaaaacccacaacttcctcaaatcttcacttccgttttcccacgatacgtcacttcccattttaaaaaaaaactacaattcccaatacatgcaagttactccgccctaaaacctacgtcacccgccccgttcccacgccccgcgccacgtcacaaactccaccccctcattatcatattggcttcaatccaaaataaggtatattattgatgatggcgat

SEQ ID NO: 33 - DNA, 36281 bp, Artificial
  nucleic acid sequence of SC-Ad-FZF-657-(delta)IIIF-(delta)E3-SpikePP-3X-L
  misc_feature (7190)..(7190): n is a, c, g, or t
  misc_feature (21647)..(21647): n is a, c, g, or t
  misc_feature (24583)..(24583): n is a, c, g, or t
  misc_feature (34871)..(34871): n is a, c, g, or t
cgccatcatcaataatataccttattttggattgaagccaatatgataatgagggggtggagtttgtgacgtggcgcggggcgtgggaacggggcgggtgacgtagtagtgtggcggaagtgtgatgttgtaagtgtggcggaacacatgtaagcgccggatgtggtaaaagtgacgtttttggtgtgcgccggtgtacacgggaagtgacaattttcgcgcggttttaggcggatgttgtagtaaatttgggcgtaaccaagtaatatttggccattttcgcgggaaaactgaataagaggaagtgaaatctgaataattctgtgttactcatagcgcgtaatatttgtctagggccgcggggactttgaccgtttacgtggagactcgcccaggtgtttttctcaggtgttttccgcgttccgggtcaaagttggcgttttattattatagtcagctgacgcgcagtgtatttatacccggtgagttcctcaagaggccactcttgagtgccagcgagtagagttttctcctccgagccgctccgacaccgggactgaaaatgagacatattatctgccacggaggtgttattaccgaagaaatggccgccagtcttttggaccagctgatcgaagaggtactggctgataatcttccacctcctagccattttgaaccacctacccttcacgaactgtatgatttagacgtgacggcccccgaagatcccaacgaggaggcggtttcgcagatttttcccgagtctgtaatgttggcggtgcaggaagggattgacttattcacttttccgccggcgcccggttctccggagccgcctcacctttcccggcagcccgagcagccggagcagagagccttgggtccggtttctatgccaaaccttgtgccggaggtgatcgatcttacctgccacgaggctggctttccacccagtgacgacgaggatgaagagggtgaggagtttgtgttagattatgtggagcaccccgggcacggttgcaggtcttgtcattatcaccggaggaatacgggggacccagatattatgtgttcgctttgctatatgaggacctgtggcatgtttgtctacagtaagtgaaaaattatgggcagtgggtgatagagtggtgggtttggtgtggtaattttttttttaatttttacagttttgtggtttaaagaattttgtattgtgattttttaaaaggtcctgtgtctgaacctgagcctgagcccgagccagaaccggagcctgcaagacctacccggcgtcctaaattggtgcctgctatcctgagacgcccgacatcacctgtgtctagagaatgcaatagtagtacggatagctgtgactccggtccttctaacacacctcctgagatacacccggtggtcccgctgtgccccattaaaccagttgccgtgagagttggtgggcgtcgccaggctgtggaatgtatcgaggacttgcttaacgagtctgggcaacctttggacttgagctgtaaacgccccaggccataaggtgtaaacctgtgattgcgtgtgtggttaacgcctttgtttgctgaatgagttgatgtaagtttaataaagggtgagataatgtttaacttgcatggcgtgttaaatggggcggggcttaaagggtatataatgcgccgtgggctaatcttggttacatctgacctcatggaggcttgggagtgtttggaagatttttctgctgtgcgtaacttgctggaacagagctctaacagtacctcttggttttggaggtttctgtggggctcctcccaggcaaagttagtctgcagaattaaggaggattacaagtgggaatttgaagagcttttgaaatcctgtggtgagctgtttgattctttgaatctgggtcaccaggcgcttttccaagagaaggtcatcaagactttggatttttccacaccggggcgcgctgcggctgctgttgcttttttgagttttataaaggataaatggagcgaagaaacccatctgagcggggggtacctgctggattttctggccatgcatctgtggagagcggtggtgagacacaagaatcgcctgctactgttgtcttccgtccgcccggcaataataccgacggaggagcaacagcaggaggaagccaggcggcggcggcggcaggagcagagcccatggaacccgagagccggcctggaccctcgggaatgaatgttgtacaggtggctgaactgtttccagaactgagacgcattttaaccattaacgaggatgggcaggggctaaagggggtaaagagggagcggggggcttctgaggctacagaggaggctaggaatctaacttttagcttaatgaccagacaccgtcctgagtgtgttacttttcagcagattaaggataattgcgctaatgagcttgatctgctggcgcagaagtattccataaagcagctgaccacttactggctgcagccaggggatgattttgaggaggctattagggtatatgcaaaggtggcacttaggccagattgcaagtacaagattagcaaacttgtaaatatcaggaattgttgctacatttctgggaacggggccgaggtggagatagatacggaggatagggtggcctttagatgtagcatgataaatatgtggccgggggtgcttggcatggacggggtggttattatgaatgtgaggtttactggtcccaattttagcggtacggttttcctggccaataccaatcttatcctacacggtgtaagcttctatgggtttaacaatacctgtgtggaagcctggaccgatgtaagggttcggggctgtgccttttactgctgctggaagggggtggtgtgtcgccccaaaagcagggcttcaattaagaaatgcctgtttgaaaggtgtaccttgggtatcctgtctgagggtaactccagggtgcgccacaatgtggcctccgactgtggttgctttatgctagtgaaaagcgtggctgtgattaagcataacatggtgtgtggcaactgcgaggacagggcctctcagatgctgacctgctcggacggcaactgtcacttgctgaagaccattcacgtagccagccactctcgcaaggcctggccagtgtttgagcacaacatactgacccgctgttccttgcatttgggtaacaggaggggggtgttcctaccttaccaatgcaatttgagtcacactaagatattgcttgagcccgagagcatgtccaaggtgaacctgaacggggtgtttgacatgaccatgaagatctggaaggtgctgaggtacgatgagacccgcaccaggtgcagaccctgcgagtgtggcggtaaacatattaggaaccagcctgtgatgctggatgtgaccgaggagctgaggcccgatcacttggtgctggcctgcacccgcgctgagtttggctctagcgatgaagatacagattgaggtactgaaatgtgtgggcgtggcttaagggtgggaaagaatatataaggtgggggtctcatgtagttttgtatctgttttgcagcagccgccgccatgagcgccaactcgtttgatggaagcattgtgagctcatatttgacaacgcgcatgcccccatgggccggggtgcgtcagaatgtgatgggctccagcattgatggtcgccccgtcctgcccgcaaactctactaccttgacctacgagaccgtgtctggaacgccgttggagactgcagcctccgccgccgcttcagccgctgcagccaccgcccgcgggattgtgactgactttgctttcctgagcccgcttgcaagcagtgcagcttcccgttcatccgcccgcgatgacaagttgacggctcttttggcacaattggattctttgacccgggaacttaatgtcgtttctcagcagctgttggatctgcgccagcaggtttctgccctgaaggcttcctcccctcccaatgcggtttaaaacataaataaaaaccagactctgtttggatttggatcaagcaagtgtcttgctgtctttatttaggggttttgcgcgcgcggtaggcccgggaccagcggtctcggtcgttgagggtcctgtgtattttttccaggacgtggtaaaggtgactctggatgttcagatacatgggcataagcccgtctctggggtggaggtagcaccactgcagagcttcatgctgcggggtggtgttgtagatgatccagtcgtagcaggagcgctgggcgtggtgcctaaaaatgtctttcagtagcaagctgattgccaggggcaggcccttggtgtaagtgtttacaaagcggttaagctgggatgggtgcatacgtggggatatgagatgcatcttggactgtatttttaggttggctatgttcccagccatatccctccggggattcatgttgtgcagaaccaccagcacagtgtatccggtgcacttgggaaatttgtcatgtagcttagaaggaaatgcgtggaagaacttggagacgcccttgtgacctccaagattttccatgcattcgtccataatgatggcaatgggcccacgggcggcggcctgggcgaagatatttctgggatcactaacgtcatagttgtgttccaggatgagatcgtcataggccatttttacaaagcgcgggcggagggtgccagactgcggtataatggttccatccggcccaggggcgtagttaccctcacagatttgcatttcccacgctttgagttcagatggggggatcatgtctacctgcggggcgatgaagaaaaccgtttccggggtaggggagatcagctgggaagaaagcaggttcctaagcagctgcgacttaccgcagccggtgggcccgtaaatcacacctattaccggctgcaactggtagttaagagagctgcagctgccgtcatccctgagcaggggggccacttcgttaagcatgtccctgacttgcatgttttccctgaccaaatccgccagaaggcgctcgccgcccagcgatagcagttcttgcaaggaagcaaagtttttcaacggtttgaggccgtccgccgtaggcatgcttttgagcgtttgaccaagcagttccaggcggtcccacagctcggtcacgtgctctacggcatctcgatccagcatatctcctcgtttcgcgggttggggcggctttcgctgtacggcagtagtcggtgctcgtccagacgggccagggtcatgtctttccacgggcgcagggtcctcgtcagcgtagtctgggtcacggtgaaggggtgcgctccgggttgcgcgctggccagggtgcgcttgaggctggtcctgctggtgctgaagcgctgccggtcttcgccctgcgcgtcggccaggtagcatttgaccatggtgtcatagtccagcccctccgcggcgtggcccttggcgcgcagcttgcccttggaggaggcgccgcacgaggggcagtgcagacttttaagggcgtagagcttgggcgcgagaaataccgattccggggagtaggcatccgcgccgcaggccccgcagacggtctcgcattccacgagccaggtgagctctggccgttcggggtcaaaaaccaggtttcccccatgctttttgatgcgtttcttacctctggtttccatgagccggtgtccacgctcggtgacgaaaaggctgtccgtgtccccgtatacagacttgagaggcctgtcctcgagcggtgttccgcggtcctcctcgtatagaaactcggaccactctgagacgaaggctcgcgtccaggccagcacgaaggaggctaagtgggaggggtagcggtcgttgtccactagggggtccactcgctccagggtgtgaagacacatgtcgccctcttcggcatcaaggaaggtgattggtttataggtgtaggccacgtgaccgggtgttcctgaaggggggctataaaagggggtgggggcgcgttcgtcctcactctcttccgcatcgctgtctgcgagggccagctgttggggtgagtactccctctcaaaagcgggcatgacttctgcgctaagattgtcagtttccaaaaacgaggaggatttgatattcacctggcccgcggtgatgcctttgagggtggccgcgtccatctggtcagaaaagacaatctttttgttgtcaagcttggtggcaaacgacccgtagagggcgttggacagcaacttggcgatggagcgcagggtttggtttttgtcgcgatcggcgcgctccttggccgcgatgtttagctgcacgtattcgcgcgcaacgcaccgccattcgggaaagacggtggtgcgctcgtcgggcactaggtgcacgcgccaaccgcggttgtgcagggtgacaaggtcaacgctggtggctacctctccgcgtaggcgctcgttggtccagcagaggcggccgcccttgcgcgagcagaatggcggtagtgggtctagctgcgtctcgtccggggggtctgcgtccacggtaaagaccccgggcagcaggcgcgcgtcgaagtagtctatcttgcatccttgcaagtctagcgcctgctgccatgcgcgggcggcaagcgcgcgctcgtatgggttgagtgggggaccccatggcatggggtgggtgagcgcggaggcgtacatgccgcaaatgtcgtaaacgtagaggggctctctgagtattccaagatatgtagggtagcatcttccaccgcggatgctggcgcgcacgtaatcgtatagttcgtgcgagggagcgaggaggtcgggaccgaggttgctacgggcgggctgctctgctcggaagactatctgcctgaagatggcatgtgagttggatgatatggttggacgctggaagacgttgaagctggcgtctgtgagacctaccgcgtcacgcacgaaggaggcgtaggagtcgcgcagcttgttgaccagctcggcggtgacctgcacgtctagggcgcagtagtccagggtttccttgatgatgtcatacttatcctgtcccttttttttccacagctcgcggttgaggacaaactcttcgcggtctttccagtactcttggatcggaaacccgtcggcctccgaacggtaagagcctancatgtagaactggttgacggcctggtaggcgcagcatcccttttctacgggtagcgcgtatgcctgcgcggccttccggagcgaggtgtgggtgagcgcaaaggtgtccctaaccatgactttgaggtactggtatttgaagtcagtgtcgtcgcatccgccctgctcccagagcaaaaagtccgtgcgctttttggaacgcgggtttggcagggcgaaggtgacatcgttgaagagtatctttcccgcgcgaggcataaagttgcgtgtgatgcggaagggtcccggcacctcggaacggttgttaattacctgggcggcgagcacgatctcgtcaaagccgttgatgttgtggcccacaatgtaaagttccaagaagcgcgggatgcccttgatggaaggcaattttttaagttcctcgtaggtgagctcttcaggggagctgagcccgtgctctgaaagggcccagtctgcaagatgagggttggaagcgacgaatgagctccacaggtcacgggccattagcatttgcaggtggtcgcgaaaggtcctaaactggcgacctatggccattttttctggggtgatgcagtagaaggtaagcgggtcttgttcccagcggtcccatccaaggtccgcggctaggtctcgcgcggcggtcactagaggctcatctccgccgaacttcatgaccagcatgaagggcacgagctgcttcccaaaggcccccatccaagtataggtctctacatcgtaggtgacaaagagacgctcggtgcgaggatgcgagccgatcgggaagaactggatctcccgccaccagttggaggagtggctgttgatgtggtgaaagtagaagtccctgcgacgggccgaacactcgtgctggcttttgtaaaaacgtgcgcagtactggcagcggtgcacgggctgtacatcctgcacgaggttgacctgacgaccgcgcacaaggaagcagagtgggaatttgagcccctcgcctggcgggtttggctggtggtcttctacttcggctgcttgtccttgaccgtctggctgctcgaggggagttacggtggatcggaccaccacgccgcgcgagcccaaagtccagatgtccgcgcgcggcggtcggagcttgatgacaacatcgcgcagatgggagctgtccatggtctggagctcccgcggcgtcaggtcaggcgggagctcctgcaggtttacctcgcatagccgggtcagggcgcgggctaggtccaggtgatacctgatttccaggggctggttggtggcggcgtcgatggcttgcaagaggccgcatccccgcggcgcgactacggtaccgcgcggcgggcggtgggccgcgggggtgtccttggatgatgcatctaaaagcggtgacgcgggcgggcccccggaggtagggggggctcgggacccgccgggagagggggcaggggcacgtcggcgccgcgcgcgggcaggagctggtgctgcgcgcggaggttgctggcgaacgcgacgacgcggcggttgatctcctgaatctggcgcctctgcgtgaagacgacgggcccggtgagcttgaacctgaaagagagttcgacagaatcaatttcggtgtcgttgacggcggcctggcgcaaaatctcctgcacgtctcctgagttgtcttgataggcgatctcggccatgaactgctcgatctcttcctcctggagatctccgcgtccggctcgctccacggtggcggcgaggtcgttggagatgcgggccatgagctgcgagaaggcgttgaggcctccctcgttccagacgcggctgtagaccacgcccccttcggcatcgcgggcgcgcatgaccacctgcgcgagattgagctccacgtgccgggcgaagacggcgtagtttcgcaggcgctgaaagaggtagttgagggtggtggcggtgtgttctgccacgaagaagtacataacccagcgccgcaacgtggattcgttgatatcccccaaggcctcaaggcgctccatggcctcgtagaagtccacggcgaagttgaaaaactgggagttgcgcgccgacacggttaactcctcctccagaagacggatgagctcggcgacagtgtcgcgcacctcgcgctcaaaggctacaggggcctcttcttcttcttcaatctcctcttccataagggcctccccttcttcttcttctggcggcggtgggggaggggggacacggcggcgacgacggcgcaccgggaggcggtcgacaaagcgctcgatcatctccccgcggcgacggcgcatggtctcggtgacggcgcggccgttctcgcgggggcgcagttggaagacgccgcccgtcatgtcccggttatgggttggcggggggctgccgtgcggcagggatacggcgctaacgatgcatctcaacaattgttgtgtaggtactccgccaccgagggacctgagcgagtccgcatcgaccggatcggaaaacctctcgagaaaggcgtctaaccagtcacagtcgcaaggtaggctgagcaccgtggcgggcggcagcgggcggcggtcggggttgtttctggcggaggtgctgctgatgatgtaattaaagtaggcggtcttgagacggcggatggtcgacagaagcaccatgtccttgggtccggcctgctgaatgcgcaggcggtcggccatgccccaggcttcgttttgacatcggcgcaggtctttgtagtagtcttgcatgagcctttctaccggcacttcttcttctccttcctcttgtcctgcatctcttgcatctatcgctgcggcggcggcggagtttggccgtaggtggcgccctcttcctcccatgcgtgtgaccccgaagcccctcatcggctgaagcagggccaggtcggcgacaacgcgctcggctaatatggcctgctgcacctgcgtgagggtagactggaagtcgtccatgtccacaaagcggtggtatgcgcccgtgttgatggtgtaagtgcagttggccataacggaccagttaacggtctggtgacccggctgcgagagctcggtgtacctgagacgcgagtaagcccttgagtcaaagacgtagtcgttgcaagtccgcaccaggtactggtatcccaccaaaaagtgcggcggcggctggcggtagaggggccagcgtagggtggccggggctccgggggcgaggtcttccaacataaggcgatgatatccgtagatgtacctggacatccaggtgatgccggcggcggtggtggaggcgcgcggaaagtcacggacgcggttccagatgttgcgcagcggcaaaaagtgctccatggtcgggacgctctggccggtcaggcgcgcgcagtcgttgacgctctagaccgtgcaaaaggagagcctgtaagcgggcactcttccgtggtctggtggataaattcgcaagggtatcatggcggacgaccggggttcgaaccccggatccggccgtccgccgtgatccatgcggttaccgcccgcgtgtcgaacccaggtgtgcgacgtcagacaacgggggagcgctccttttggcttccttccaggcgcggcggatgctgcgctagcttttttggccactggccgcgcgcggcgtaagcggttaggctggaaagcgaaagcattaagtggctcgctccctgtagccggagggttattttccaagggttgagtcgcgggacccccggttcgagtctcgggccggccggactgcggcgaacgggggtttgcctccccgtcatgcaagaccccgcttgcaaattcctccggaaacagggacgagccccttttttgcttttcccagatgcatccggtgctgcggcagatgcgcccccctcctcagcagcggcaagagcaagagcagcggcagacatgcagggcaccctcccctcctcctaccgcgtcaggaggggcgacatccgcggttgacgcggcagcagatggtgattacgaacccccgcggcgccgggcccggcactacctggacttggaggagggcgagggcctggcgcggctaggagcgccctctcctgagcggtacccaagggtgcagctgaagcgtgatacgcgtgaggcgtacgtgccgcggcagaacctgtttcgcgaccgcgagggagaggagcccgaggagatgcgggatcgaaagttccacgcagggcgcgagctgcggcatggcctgaatcgcgagcggttgctgcgcgaggaggactttgagcccgacgcgcgaaccgggattagtcccgcgcgcgcacacgtggcggccgccgacctggtaaccgcatacgagcagacggtgaaccaggagattaactttcaaaaaagctttaacaaccacgtgcgtacgcttgtggcgcgcgaggaggtggctataggactgatgcatctgtgggactttgtaagcgcgctggagcaaaacccaaatagcaagccgctcatggcgcagctgttccttatagtgcagcacagcagggacaacgaggcattcagggatgcgctgctaaacatagtagagcccgagggccgctggctgctcgatttgataaacatcctgcagagcatagtggtgcaggagcgcagcttgagcctggctgacaaggtggccgccatcaactattccatgcttagcctgggcaagttttacgcccgcaagatataccataccccttacgttcccatagacaaggaggtaaagatcgaggggttctacatgcgcatggcgctgaaggtgcttaccttgagcgacgacctgggcgtttatcgcaacgagcgcatccacaaggccgtgagcgtgagccggcggcgcgagctcagcgaccgcgagctgatgcacagcctgcaaagggccctggctggcacgggcagcggcgatagagaggccgagtcctactttgacgcgggcgctgacctgcgctgggccccaagccgacgcgccctggaggcagctggggccggacctgggctggcggtggcacccgcgcgcgctggcaacgtcggcggcgtggaggaatatgacgaggacgatgagtacgagccagaggacggcgagtactaagcggtgatgtttctgatcagtcgcggccgcgatatcgctagcgaagttcctattctctagaaagtataggaacttcggatcctctagagtcgaaaaaaaaaaagcatgatgcaaaataaaaaactcaccaaggccatggcaccgagcgttggttttcttgtattccccttagtatgcggcgcgcggcgatgtatgaggaaggtcctcctccctcctacgagagtgtggtgagcgcggcgccagtggcggcggcgctgggttctcccttcgatgctcccctggacccgccgtttgtgcctccgcggtacctgcggcctaccggggggagaaacagcatccgttactctgagttggcacccctattcgacaccacccgtgtgtacctggtggacaacaagtcaacggatgtggcatccctgaactaccagaacgaccacagcaactttctgaccacggtcattcaaaacaatgactacagcccgggggaggcaagcacacagaccatcaatcttgacgaccggtcgcactggggcggcgacctgaaaaccatcctgcataccaacatgccaaatgtgaacgagttcatgtttaccaataagtttaaggcgcgggtgatggtgtcgcgcttgcctactaaggacaatcaggtggagctgaaatacgagtgggtggagttcacgctgcccgagggcaactactccgagaccatgaccatagaccttatgaacaacgcgatcgtggagcactacttgaaagtgggcagacagaacggggttctggaaagcgacatcggggtaaagtttgacacccgcaacttcagactggggtttgaccccgtcactggtcttgtcatgcctggggtatatacaaacgaagccttccatccagacatcattttgctgccaggatgcggggtggacttcacccacagccgcctgagcaacttgttgggcatccgcaagcggcaacccttccaggagggctttaggatcacctacgatgatctggagggtggtaacattcccgcactgttggatgtggacgcctaccaggcgagcttgaaagatgacaccgaacagggcgggggtggcgcaggcggcagcaacagcagtggcagcggcgcggaagagaactccaacgcggcagccgcggcaatgcagccggtggaggacatgaacgatcatgccattcgcggcgacacctttgccacacgggctgaggagaagcgcgctgaggccgaagcagcggccgaagctgccgcccccgctgcgcaacccgaggtcgagaagcctcagaagaaaccggtgatcaaacccctgacagaggacagcaagaaacgcagttacaacctaataagcaatgacagcaccttcacccagtaccgcagctggtaccttgcatacaactacggcgaccctcagaccggaatccgctcatggaccctgctttgcactcctgacgtaacctgcggctcggagcaggtctactggtcgttgccagacatgatgcaagaccccgtgaccttccgctccacgcgccagatcagcaactttccggtggtgggcgccgagctgttgcccgtgcactccaagagcttctacaacgaccaggccgtctactcccaactcatccgccagtttacctctctgacccacgtgttcaatcgctttcccgagaaccagattttggcgcgcccgccagcccccaccatcaccaccgtcagtgaaaacgttcctgctctcacagatcacgggacgctaccgctgcgcaacagcatcggaggagtccagcgagtgaccattactgacgccagacgccgcacctgcccctacgtttacaaggccctgggcatagtctcgccgcgcgtcctatcgagccgcactttttgagcaagcatgtccatccttatatcgcccagcaataacacaggctggggcctgcgcttcccaagcaagatgtttggcggggccaagaagcgctccgaccaacacccagtgcgcgtgcgcgggcactaccgcgcgccctggggcgcgcacaaacgcggccgcactgggcgcaccaccgtcgatgacgccatcgacgcggtggtggaggaggcgcgcaactacacgcccacgccgccgccagtgtccaccgtggacgcggccattcagaccgtggtgcgcggagcccggcgctacgctaaaatgaagagacggcggaggcgcgtagcacgtcgccaccgccgccgacccggcactgccgcccaacgcgcggcggcggccctgcttaaccgcgcacgtcgcaccggccgacgggcggccatgcgagccgctcgaaggctggccgcgggtattgtcactgtgccccccaggtccaggcgacgagcggccgccgcagcagccgcggccattagtgttatgactcagggtcgcaggggcaacgtgtactgggtgcgcgactcggttagcggcctgcgcgtgcccgtgcgcacccgccccccgcgcaactagattgcaataaaaaactacttagactcgtactgttgtatgtatccagcggcggcggcgcgcatcgaagctatgtccaagcgcaaaatcaaagaagagatgctccaggtcatcgcgccggagatctatggccccccgaagaaggaagagcaggattacaagccccgaaagctaaagcgggtcaaaaagaaaaagaaagatgatgatgatgatgaacttgacgacgaggtggaactgttgcacgcgaccgcgcccaggcgacgggtacagtggaaaggtcgacgcgtaagacgtgttttgcgacccggcaccaccgtagtctttacgcccggtgagcgctccacccgcacctacaagcgcgtgtatgatgaggtgtacggcgacgaggacctgcttgagcaggccaacgagcgcctcggggagtttgcctacggaaagcggcataaggacatgctggcgttgccgctggacgagggcaacccaacacctagcctaaagcccgtgacactgcagcaggtgctgcccgcgcttgcaccgtccgaagaaaagcgcggcctaaagcgcgagtctggtgacttggcacccaccgtgcagctgatggtacccaagcgtcagcgactggaagatgtcttggaaaaaatgaccgtggagcctgggctggagcccgaggtccgcgtgcggccaatcaagcaggtggcaccgggactgggcgtgcagaccgtggacgttcagatacccaccaccagtagcactagtattgccactgccacagagggcatggagacacaaacgtccccggttgcctcggcggtggcagatgccgcggtgcaggcggccgctgcggccgcgtccaagacctctacggaggtgcaaacggacccgtggatgtttcgtgtttcagccccccggcgtccgcgccgttcaaggaagtacggcgccgccagcgcgctactgcccgaatatgccctacatccttccatcgcgcctacccccggctatcgtggctacacctaccgccccagaagacgagcaactacccgacgccgaaccaccactggaacccgccgccgccgtcgccgtcgccagcccgtgctggccccgatttccgtgcgcagggtggctcgcgaaggaggcaggaccctggtgctgccaacagcgcgctaccaccccagcatcgtttaaaagccggtctttgtggttcttgcagatatggccctcacctgccgcctccgtttcccggtgccgggattccgaggaagaatgcaccgtaggaggggcatggccggccacggcctgacgggcggcatgcgtcgtgcgcaccaccggcggcggcgcgcgtcgcaccgtcgcatgcgcgccggtatcctgcccctccttattccactgatcgccgcggcgattggcgccgtgcccggaattgcatccgtggccttgcaggcgcagagacactgattaaaaacaagttacatgtggaaaaatcaaaataaaagtctggactctcacgctcgcttggtcctgtaactattttgtagaatggaagacatcaactttgcgtcactggccccgcgacacggctcgcgcccgttcatgggaaactggcaagatatcggcaccagcaatatgagcggtggcgccttcagctggggctcgctgtggagcggcattaaaaatttcggttccgccgttaagaactatggcagcaaagcctggaacagcagcacaggccagatgctgagggacaagttgaaagagcaaaatttccaacaaaaggtggtagatggcctggcctctggcattagcggggtggtggacctggccaaccaggcagtgcaaaataagattaacagtaagcttgatccccgccctcccgtagaggagcctccaccggccgtggagacagtgtctccagaggggcgtggcgaaaagcgtccgcgacccgacagggaagaaactctggtgacgcaaatagacgagcctccctcgtacgaggaggcactaaagcaaggcctgcccaccacccgtcccatcgcgcccatggctaccggagtgctgggccagcacacacccgtaacgctggacctgcctccccccgccgacacccagcagaaacctgtgctgccaggcccgtccgccgttgttgtaacccgtcctagccgcgggtccctgcgccgcgccgccagcggtccgcgatcgttgcggcccgtagccagtggcaactggcaaagcacactgaacagcatcgtgggtctgggggtgcaatccctgaagcgccgacgatgcttctgatcgcggccgcgatatcgctagcgaagttcctattctctagaaagtataggaacttctcgatcgagcacgtgttgacaattaatcatcggcatagtatatcggcatagtataatacgacaaggtgaggaactaaaccatggccaagttgaccagtgccgttccggtgctcaccgcgcgcgacgtcgccggagcggtcgagttctggaccgaccggctcgggttctcccgggacttcgtggaggacgacttcgccggtgtggtccgggacgacgtgaccctgttcatcagcgcggtccaggaccaggtggtgccggacaacaccctggcctgggtgtgggtgcgcggcctggacgagctgtacgccgagtggtcggaggtcgtgtccacgaacttccgggacgcctccgggccggccatgaccgagatcggcgagcagccgtgggggcgggagttcgccctgcgcgacccggccggcaactgcgtgcacttcgtggccgaggagcaggactgagaattcgaagttcctattctctagaaagtataggaacttcggatcctctagagtcgatagctaacgtgtcgtatgtgtgtcatgtatgcgtccatgtcgccgccagaggagctgctgagccgccgcgcgcccgctttccaagatggctaccccttcgatgatgccgcagtggtcttacatgcacatctcgggccaggacgcctcggagtacctgagccccgggctggtgcagtttgcccgcgccaccgagacgtacttcagcctgaataacaagtttagaaaccccacggtggcgcctacgcacgacgtgaccacagaccggtcccagcgtttgacgctgcggttcatccctgtggaccgtgaggatactgcgtactcgtacaaggcgcggttcaccctagctgtgggtgataaccgtgtgctggacatggcttccacgtactttgacatccgcggcgtgctggacaggggccccacttttaagccctactccggcactgcctacaacgccctagctcccaagggtgcccccaactcatgcgagtgggatgaagatgatactcaggtacaggtagcggctgaagacgatcaagacgacgacgaagaagaggaacaactacctcagcagagaaatggcaaaaaaactcacgtatatgctcaggcaccgtttgctggcgaagcaattaacaaaaacggcctgcagataggaactaacggtgcagccactgaaggaaataaggaaatttacgcagataaaacttatcaacctgaaccacaaataggagaatcacagtggaacgaagccgaatcgtccgtagcaggtggaagggttcttaaaaagactactcccatgaaaccatgctatggctcctatgccagacctaccaattctaacggaggtcagggcgttatggttgaacaaaatggtaaattggaaagtcaagtagaaatgcaatttttttcaacttctgtaaatgctatgaacgaggcaaacgctattcaacctaaactagtgttgtatagtgaagatgtaaatatggaaaccccagacactcatctttcttataagcctggaaaaagtgatgataattctaaggcaatgttgggtcaacaatctatgccaaacagacccaattacatagctttcagggacaattttattggcctaatgtattacaacagcactggtaacatgggtgttcttgctggtcaggcatcacagctaaatgctgtcgtagatttgcaagacagaaacacagagctgtcctaccaacttttgcttgattctattggtgatcgaaccagatacttttccatgtggaatcaggctgtagacagctacgatccagatgttagaattatcgagaaccatggaactgaggatgaattgccaaattattgttttcctcttggcggaattggggtgacggacacctatcaagctattaaggctacaaatggaaatggaggcgccactacctgggctcaggacaatacttttgcagaacgaaatgaaataggggtgggaaataactttgccatggaaattaacctgaatgccaacctatggagaaatttcctttactccaatattgcgctgtacctgccagacaagctaaaatacaaccccaccaatgtggaaatatctgacaatcccaacacctacgactacatgaacaagcgagtggtggctcccgggctggtggattgctacattaaccttggggcgcgctggtctctggactacatggacaacgttaatccctttaaccaccaccgcaatgcgggcctgcgttaccgctccatgttgttgggaaacggccgctacgtgccctttcacattcaggtgccccaaaagttttttgccattaaaaacctcctcctcctgccaggctcatacacatatgaatggaacttcaggaaggatgttaacatggttctgcagagctctctgggaaacgaccttagagttgacggggctagcattaagtttgacagcatttgtctttacgccaccttcttccccatggcccacaacacggcctccacgctggaagccatgctcagaaatgacaccaacgaccagtcctttaatgactacctttccgccgccaacatgctatatcccatacccgccaacgccaccaacgtgcccatctccatcccatcgcgcaactgggcagcatttcgcggttgggccttcacacgcttgaagacaaaggaaaccccttccctgggatcaggctacgacccttactacacctactctggctccataccataccttgacggaaccttctatcttaatcacacctttaagaaggtggccattacttttgactcttctgttagctggccgggcaacgaccgcctgcttactcccaatgagtttgagattaagcgctcagttgacggggagggctataacgtagctcagtgcaacatgacaaaggactggttcctagtgcagatgttggccaactacaatattggctaccagggcttctacattccagaaagctacaaagaccgcatgtactcgttcttcagaaacttccagcccatgagccggcaagtggtggacgatactaaatacaaagattatcagcaggttggaattatccaccagcataacaactcaggcttcgtaggctacctcgctcccaccatgcgcgagggacaagcttaccccgctaatgttccctacccactaataggcaaaaccgcggttgatagtattacccagaaaaagtttctttgcgaccgcaccctgtggcgcatccccttctccagtaactttatgtccatgggtgcgctcacagacctgggccaaaaccttctctacgcaaactccgcccacgcgctagacatgacctttgaggtggatcccatggacgagcccacccttctttatgttttgtttgaagtctttgacgtggtccgtgtgcaccagccgcaccgcggcgtcatcgagaccgtgtacctgcgcacgcccttctcggccggcaacgccacaacataaagaagcaagcaacatcaacaacagctgccgccatgggctccagtgagcaggaactgaaagccattgtcaaagatcttggttgtgggccatattttttgggcacctatgacaagcgcttcccaggctttgtttccccacacaagctcgcctgcgccatagttaacacggccggtcgcgagactgggggcgtacactggatggcctttgcctggaacccgcgctcaaaaacatgctacctctttgagccctttggcttttctgaccaacgtctcaagcaggtttaccagtttgagtacgagtcactcctgcgccgtagcgccattgcctcttcccccgaccgctgtataacgctggaaaagtccacccaaagcgtgcaggggcccaactcggccgcctgtggcctattctgctgcatgtttctccacgcctttgccaactggccccaaactcccatggatcacaaccccaccatgaaccttattaccggggtacccaactccatgcttaacagtccccaggtacagcccaccctgcgccgcaaccaggaacagctctacagcttcctggagcgccactcgccctacttccgcagccacagtgcgcaaattaggagcgccacttctttttgtcacttgaaaaacatgtaaaaataatgtactaggagacactttcaataaaggcaaatgtttttatttgtacactctcgggtgattatttacccccacccttgccgtctgcgccgtttaaaaatcaaaggggttctgccgcgcatcgctatgcgccactggcagggacacgttgcgatactggtgtttagtgctccacttaaactcaggcacaaccatccgcggcagctcggtgaagttttcactccacaggctgcgcaccatcaccaacgcgtttagcaggtcgggcgccgatatcttgaagtcgcagttggggcctccgccctgcgcgcgcgagttgcgatacacagggttacagcactggaacactatcagcgccgggtggtgcacgctggccagcacgctcttgtcggagatcanatccgcgtccaggtcctccgcgttgctcagggcgaacggagtcaactttggtagctgccttcccaaaaagggtgcatgcccaggctttgagttgcactcgcaccgtagtggcatcagaaggtgaccgtgcccagtctgggcgttaggatacagcgcctgcatgaaagccttgatctgcttaaaagccacctgagcctttgcgccttcagagaagaacatgccgcaagacttgccggaaaactgattggccggacaggccgcgtcatgcacgcagcaccttgcgtcggtgttggagatctgcaccacatttcggccccaccggttcttcacgatcttggccttgctagactgctccttcagcgcgcgctgcccgttttcgctcgtcacatccatttcaatcacgtgctccttatttatcataatgctcccgtgtagacacttaagctcgccttcgatctcagcgcagcggtgcagccacaacgcgcagcccgtgggctcgtggtgcttgtaggttacctctgcaaacgactgcaggtacgcctgcaggaatcgccccatcatcgtcacaaaggtcttgttgctggtgaaggtcagctgcaacccgcggtgctcctcgtttagccaggtcttgcatacggccgccagagcttccacttggtcaggcagtagcttgaagtttgcctttagatcgttatccacgtggtacttgtccatcaacgcgcgcgcagcctccatgcccttctcccacgcagacacgatcggcaggctcagcgggtttatcaccgtgctttcactttccgcttcactggactcttccttttcctcttgcatccgcataccccgcgccactgggtcgtcttcattcagccgccgcaccgtgcgcttacctcccttgccgtgcttgattagcaccggtgggttgctgaaacccaccatttgtagcgccacatcttctctttcttcctcgctgtccacgatcacctctggggatggcgggcgctcgggcttgggagaggggcgcttctttttctttttggacgcaatggccaaatccgccgtcgaggtcgatggccgcgggctgggtgtgcgcggcaccagcgcatcttgtgacgagtcttcttcgtcctcggactcgagacgccgcctcagccgcttttttgggggcgcgcggggaggcggcggcgacggcgacggggacgagacgtcctccatggttggtggacgtcgcgccgcaccgcgtccgcgctcgggggtggtttcgcgctgctcctcttcccgactggccatttccttctcctataggcagaaaaagatcatggagtcagtcgagaaggaggacagcctaaccgccccctttgagttcgccaccaccgcctccaccgatgccgccaacgcgcctaccaccttccccgtcgaggcacccccgcttgaggaggaggaagtgattatcgagcaggacccaggttttgtaagcgaagacgacgaagatcgctcagtaccaacagaggataaaaagcaagaccaggacgacgcagaggcaaacgaggaacaagtcgggcggggggaccaaaggcatggcgactacctagatgtgggagacgacgtgctgttgaagcatctgcagcgccagtgcgccattatctgcgacgcgttgcaagagcgcagcgatgtgcccctcgccatagcggatgtcagccttgcctacgaacgccacctgttctcaccgcgcgtaccccccaaacgccaagaaaacggcacatgcgagcccaacccgcgcctcaacttctaccccgtatttgccgtgccagaggtgcttgccacctatcacatctttttccaaaactgcaagatacccctatcctgccgtgccaaccgcagccgagcggacaagcagctggccttgcggcagggcgctgtcatacctgatatcgcctcgctcgacgaagtgccaaaaatctttgagggtcttggacgcgacgagaagcgcgcggcaaacgctctgcaacaagaaaacagcgaaaatgaaagtcactgtggagtgctggtggaacttgagggtgacaacgcgcgcctagccgtgctgaaacgcagcatcgaggtcacccactttgcctacccggcacttaacctaccccccaaggttatgagcacagtcatgagcgagctgatcgtgcgccgtgcacgacccctggagagggatgcaaacttgcaagaacaaaccgaggagggcctacccgcagttggcgatgagcagctggcgcgctggcttgagacgcgcgagcctgccgacttggaggagcgacgcaagctaatgatggccgcagtgcttgttaccgtggagcttgagtgcatgcagcggttctttgctgacccggagatgcagcgcaagctagaggaaacgttgcactacacctttcgccagggctacgtgcgccaggcctgcaaaatttccaacgtggagctctgcaacctggtctcctaccttggaattttgcacgaaaaccgccttgggcaaaacgtgcttcattccacgctcaagggcgaggcgcgccgcgactacgtccgcgactgcgtttacttatttctgtgctacacctggcaaacggccatgggcgtgtggcagcagtgcctggaggagcgcaacctgaaggagctgcagaagctgctaaagcaaaacttgaaggacctatggacggccttcaacgagcgctccgtggccgcgcacctggcggacattatcttccccgaacgcctgcttaaaaccctgcaacagggtctgccagacttcaccagtcaaagcatgttgcaaaactttaggaactttatcctagagcgttcaggaattctgcccgccacctgctgtgcgcttcctagcgactttgtgcccattaagtaccgtgaatgccctccgccgctttggggtcactgctaccttntgcagctagccaactaccttgcctaccactccgacatcatggaagacgtgagcggtgacggcctactggagtgtcactgtcgctgcaacctatgcaccccgcaccgctccctggtctgcaattcacaactgcttagcgaaagtcaaattatcggtacctttgagctgcagggtccctcgcctgacgaaaagtccgcggctccggggttgaaactcactccggggctgtggacgtcggcttaccttcgcaaatttgtacctgaggactaccacgcccacgagattaggttctacgaagaccaatcccgcccgccaaatgcggagcttaccgcctgcgtcattacccagggccacatccttggccaattgcaagccattaacaaagcccgccaagagtttctgctacgaaagggacggggggtttacttggacccccagtccggcgaggagctcaacccaatccccccgccgccgcagccctatcagcagccgcgggcccttgcttcccaggatggcacccaaaaagaagctgcagctgccgccgccgccacccacggacgaggaggaatactgggacagtcaggcagaggaggttttggacgaggaggaggagatgatggaagactgggacagcctagacgaggaagcttccgaggccgaagaggtgtcagacgaaacaccgtcaccctcggtcgcattcccctcgccggcgccccagaaatcggcaaccgttcccagcattgctacaacctccgctcctcaggcgccgccggcactgcccgttcgccgacccaaccgtagatgggacaccactggaaccagggccggtaagtctaagcagccgccgccgttagcccaagagcaacaacagcgccaaggctaccgctcgtggcgcgtgcacaagaacgccatagttgcttgcttgcaagactgtgggggcaacatctccttcgcccgccgctttcttctctaccatcacggcgtggccttcccccgtaacatcctgcattactaccgtcatctctacagcccctactgcaccggcggcagcggcagcaacagcagcggccacgcagaagcaaaggcgaccggatagcaagactctgacaaagcccaagaaatccacagcggcggcagcagcaggaggaggagcactgcgtctggcgcccaacgaacccgtatcgacccgcgagcttagaaacaggatttttcccactctgtatgctatatttcaacagagcaggggccaagaacaagagctgaaaataaaaaacaggtctctgcgctccctcacccgcagctgcctgtatcacaaaagcgaagatcagcttcggcgcacgctggaagacgcggaggctctcttcagcaaatactgcgcgctgactcttaaggactagtttcgcgccctttctcaaatttaagcgcgaaaactacgtcatctccagcggccacacccggcgccagcacctgtcgtcagcgccattatgagcaaggaaattcccacgccctacatgtggagttaccagccacaaatgggacttgcggctggagctgcccaagactactcaacccgaataaactacatgagcgcgggaccccacatgatatcccgggtcaacggaatccgcgcccaccgaaaccgaattctcctcgaacaggcggctattaccaccacacctcgtaataaccttaatccccgtagttggcccgctgccctggtgtaccaggaaagtcccgctcccaccactgtggtacttcccagagacgcccaggccgaagttcagatgactaactcaggggcgcagcttgcgggcggctttcgtcacagggtgcggtcgcccgggcagggtataactcacctgaaaatcagagggcgaggtattcagctcaacgacgagtcggtgagctcctctcttggtctccgtccggacgggacatttcagatcggcggcgctggccgctcttcatttacgccccgtcaggcgatcctaactctgcagacctcgtcctcggagccgcgctccggaggcattggaactctacaatttattgaggagttcgtgccttcggtttacttcaaccccttttctggacctcccggccactacccggaccagtttattcccaactttgacgcggtaaaagactcggcggacggctacgactgacagatctgagctcgcggccgcgatatcgctagcgaagttcctattctctagaaagtataggaacttcgatcctctagagtcgacctgcaggcatgcaagcttggcactgcaataaattacttacttaaaatcagtcagcaaatctttgtccagcttattcagcatcacctcctttccctcctcccaactctggtatttcagcagccttttagctgcgaactttctccaaagtctaaatgggatgtcaaattcctcatgttcttgtccctccgcacccactatcttcatattgttgcagatgaaacgcgccagaccgtctgaagacaccttcaaccctgtgtacccatatgacacggaaaccggccctccaactgtgcctttccttacccctccctttgtgtcgccaaatgggttccaagaaagtccccccggagtgctttctttgcgtctttcagaacctttggttacctcacacggcatgcttgcgctaaaaatgggcagcggcctgtccctggatcaggcaggcaaccttacatcaaatacaatcactgtttctcaaccgctaaaaaaaacaaagtccaatataactttggaaacatccgcgccccttacagtcagctcaggcgccctaaccatggccacaacttcgcctttggtggtctctgacaacactcttaccatgcaatcacaagcaccgctaaccgtgcaagactcaaaacttagcattgctaccaaagagccacttacagtgttagatggaaaactggccctgcagacatcagcccccctctctgccactgataacaacgccctcactatcactgcctcacctcctcttactactgcaaatggtagtctggctgttaccatggaaaacccactttacaacaacaatggaaaacttgggctcaaaattggcggtcctttgcaagtggccaccgactcacatgcactaacactaggtactggtcagggggttgcagttcataacaatttgctacatacaaaagttacaggcgcaatagggtttgatacatctggcaacatggaacttaaaactggagatggcctctatgtggatagcgccggtcctaaccaaaaactacatattaatctaaataccacaaaaggccttgcttttgacaacaccgcaataacaattaacgctggaaaagggttggaatttgaaacagactcctcaaacggaaatcccataaaaacaaaaattggatcaggcatacaatataataccaatggagctatggttgcaaaacttggaacaggcctcagttttgacagctccggagccataacaatgggcagcataaacaatgacagacttactctttggacaacaccagacccatccccaaattgcagaattgcttcagataaagactgcaagctaactctggcgctaacaaaatgtggcagtcaaattttgggcactgtttcagctttggcagtatcaggtaatatggcctccatcaatggaactctaagcagtgtaaacttggttcttagatttgatgacaacggagtgcttatgtcaaattcatcactggacaaacagtattggaactttagaaacggggactccactaacggtcaaccatacacttatgctgttgggtttatgccaaacctaaaagcttacccaaaaactcaaagtaaaactgcaaaaagtaatattgttagccaggtgtatcttaatggtgacaagtctaaaccattgcattttactattacgctaaatggaacagatgaaaccaaccaagtaagcaaatactcaatatcattcagttggtcctggaacagtggacaatacactaatgacaaatttgccaccaattcctataccttctcctacattgcccaggaataaagaatcgtgaacctgttgcatgttatgtttcaacgtgtttatttttcaattcgtattagtcatcgctattaccatggtgatgcggttttggcagtacatcaatgggcgtggatagcggtttgactcacggggatttccaagtctccaccccattgacgtcaatgggagtttgttttggcaccaaaatcaacgggactttccaaaatgtcgtaacaactccgccccattgacgcaaatgggcggtaggcgtgtacggtgggaggtctatataagcagagctggtttagtgaaccgtcagatccgctagagatccaccatgtttgtctttctcgtgctgctgcccctcgtgagcagccagtgcgtcaatctgacaacaaggacccagctgccccccgcctacaccaactccttcacaagaggcgtgtattaccccgataaggtcttcagatccagcgtcctccacagcacccaagatttgtttctgcctttcttcagcaacgtgacatggttccacgccattcatgtcagcggcacaaacggcacaaagaggtttgacaaccccgtgctccccttcaacgacggcgtgtacttcgccagcacagagaaatccaatatcattaggggctggatcttcggcacaacactggattccaagacccagtctctgctcattgtgaataacgccaccaacgtggtgattaaggtctgtgagtttcagttctgcaacgacccctttctgggagtctactaccacaagaataataagagctggatggagtccgagtttagggtgtacagctccgccaacaactgtaccttcgaatacgtgtcccagcctttcctcatggatctggagggcaagcaaggcaatttcaaaaatctgagagagttcgtgttcaaaaacattgatggatacttcaaaatctacagcaagcatacccccattaatctggtgagggatctgccccaaggattctccgctctggaacctctggtggatctgcccattggcattaacatcacaagattccagaccctcctcgccctccatagatcctatctgacccccggcgactcctccagcggatggacagccggagctgccgcctactacgtgggctatctgcagccaagaacctttctgctgaagtacaacgagaacggcaccatcacagacgctgtcgattgcgctctcgaccctctgagcgagaccaaatgcacactgaagagcttcaccgtggaaaagggcatctatcagaccagcaacttcagagtgcagcctaccgagagcattgtgaggtttcccaacatcaccaatctgtgtcctttcggcgaggtctttaatgccacaaggttcgcttccgtgtatgcttggaataggaagaggatcagcaattgcgtcgccgactattccgtcctctataacagcgcctccttctccaccttcaaatgttatggcgtgtcccccaccaagctcaacgacctctgcttcaccaatgtgtacgctgactccttcgtcattaggggcgacgaggtgaggcaaattgcccccggccagaccggcaagattgctgattacaactacaaactgcccgacgattttaccggctgcgtgatcgcttggaactccaacaatctggactccaaagtgggcggaaactacaattacctctacagactctttagaaaaagcaatctgaagcccttcgagagagacatctccaccgaaatctaccaagccggaagcacaccttgcaatggcgtcgagggatttaactgctacttccctctgcagagctacggctttcaacctaccaacggcgtcggatatcaaccctatagggtggtcgtgctgagctttgaactgctgcatgctcccgccaccgtctgcggacctaagaagagcaccaatctcgtcaaaaacaagtgcgtgaacttcaacttcaatggactgaccggcaccggcgtgctgaccgagagcaataagaagtttctgcccttccagcagttcggaagggatattgccgataccacagatgctgtgagggacccccaaaccctcgagattctggatatcaccccttgcagcttcggaggagtgtccgtgatcacccccggaacaaacacctccaatcaagtggctgtgctgtaccaagacgtgaactgcacagaagtccccgtggccatccatgccgaccagctgacccctacatggagagtgtactccaccggcagcaatgtgttccagacaagagccggatgcctcattggagctgaacacgtcaacaacagctacgagtgcgacattcccatcggcgccggcatttgtgcctcctatcagacccagaccaacagcccaagaagggctagaagcgtcgcttcccaatccatcattgcctacaccatgtctctgggagccgaaaactccgtcgcctactccaacaatagcatcgccatccccaccaattttaccatctccgtgaccacagagattctgcccgtgtccatgacaaagacatccgtggactgcaccatgtacatctgtggcgacagcaccgagtgtagcaatctgctgctgcaatatggcagcttctgcacccagctgaacagagccctcaccggcatcgccgtcgaacaagacaagaacacccaagaggtgttcgcccaagtgaagcaaatctacaagaccccccctatcaaagatttcggaggattcaactttagccagattctgcccgatcctagcaagccttccaagaggagcttcatcgaggatctgctgtttaataaggtgacactggccgacgctggcttcattaaacagtacggcgattgtctgggcgacatcgctgctagggatctgatctgcgctcagaagttcaacggactgacagtcctccctcctctgctgaccgacgagatgatcgctcagtataccagcgctctgctggctggaaccattaccagcggctggacattcggcgctggagccgccctccaaattccctttgccatgcagatggcctatagattcaacggcattggcgtcacccaaaatgtgctgtatgaaaatcagaagctgattgctaaccaattcaatagcgccattggcaagatccaagactctctgagctccacagccagcgccctcggaaagctgcaagacgtggtgaatcaaaacgcccaagctctgaacacactggtgaaacagctcagcagcaactttggagccatcagcagcgtgctcaatgatatcctctctaggctggaccctccggaggccgaagtccagatcgatagactcatcaccggcagactccaatctctgcagacatacgtcacccaacagctcattagagctgccgaaatcagagcctccgccaatctggccgccaccaagatgtccgagtgcgtgctgggacagagcaagagagtggacttctgtggcaagggataccatctgatgagcttcccccagagcgctccccatggagtggtctttctgcatgtcacatacgtgcccgcccaagagaagaacttcaccaccgctcccgccatttgccacgatggaaaggcccactttcccagagaaggagtgttcgtgagcaacggcacacactggtttgtcacccagagaaatttttacgagccccagattatcaccaccgacaacaccttcgtgtccggaaactgcgatgtcgtgattggcatcgtgaacaacacagtctacgaccctctgcagcccgaactcgacagcttcaaggaagagctggacaagtacttcaagaatcacacatcccccgacgtggatctgggcgacattagcggcattaatgcctccgtcgtcaacattcagaaggagattgatagactgaatgaagtcgccaagaacctcaatgagtctctgattgatctgcaagagctgggcaagtacgagcaatacatcaaatggccttggtacatctggctgggattcatcgctggactcatcgccatcgtgatggtcaccattatgctgtgttgcatgaccagctgctgcagctgtctgaagggctgctgcagctgcggaagctgctgcaagtttgacgaagacgactccgagcccgtgctgaagggcgtcaagctgcattatacataaactagtgctggaattcgcccttatagagtgctggaattcgcccttatagagtgctggaattcgcccttatatctagtaacggccgccagtgtgctggaattcgcccttataacttcgtatagcatacattatacgaagttataagggcgaattctgcagatatccatcctttaaaaaacctcccacacctccccctgaacctgaaacataaaatgaatgcaattgttgttgttaacttgtttattgcagcttataatggttacaaataaagcaatagcatcacaaatttcacaaataaagcatttttttcactgcattctagttgtggtttgtccaaactcatcaatgtatcttaacaacgtgtttatttttcaattgcagaaagaattgcagaaaatttcaagtcatttttcattcagtagtatagccccaccaccacatagcttatactaatcaccgtaccttaatcaaactcacagaaccctagtattcaacctgccacctccctcccaacacacagagtacacagtcctttctccccggctggccttaaacagcatcatatcatgggtaacagacatattcttaggtgttatattccacacggtctcctgtcgagccaaacgctcatcagtgatgttaataaactccccgggcagctcgcttaagttcatgtcgctgtccagctgctgagccacaggctgctgtccaacttgcggttgctcaacgggcggcgaaggagaagtccacgcctacatgggggtagagtcataatcgtgcatcaggatagggcggtggtgctgcagcagcgcgcgaataaactgctgccgccgccgctccgtcctgcaggaatacaacatggcagtggtctcctcagcgatgattcgcaccgcccgcagcataaggcgccttgtcctccgggcacagcagcgcaccctgatctcacttaagtcagcacagtaactgcagcacagtaccacaatattgtttaaaatcccacagtgcaaggcgctgtatccaaagctcatggcggggaccacagaacccacgtggccatcataccacaagcgcaggtagattaagtggcgacccctcataaacacgctggacataaacattacctcttttggcatgttgtaattcaccacctcccggtaccatataaacctctgattaaacatggcgccatccaccaccatcctaaaccagctggccaaaacctgcccgccggctatgcactgcagggaaccgggactggaacaatgacagtggagagcccaggactcgtaaccatggatcatcatgctcgtcatgatatcaatgttggcacaacacaggcacacgtgcatacacttcctcaggattacaagctcctcccgcgtcagaaccatatcccagggaacaacccattcctgaatcagcgtaaatcccacactgcagggaagacctcgcacgtaactcacgttgtgcattgtcaaagtgttacattcgggcagcagcggatgatcctccagtatggtagcgcgtgtctctgtctcaaaaggaggtaggcgatccctactgtacggagtgcgccgagacaaccgagatcgtgttggtcgtagtgtcatgccaaatggaacgccggacgtagtcatatttcctgaagcaaaaccaggtgcgggcgtgacaaacagatctgcgtctccggtctcgtcgcttagctcgctctgtgtagtagttgtagtatatccactctctcaaagcatccaggcgccccctggcttcgggttctatgtaaactccttcatgcgccgctgccctgataacatccaccaccgcagaataagccacacccagccaacctacacattcgttctgcgagtcacacacgggaggagcgggaagagctggaagaaccatgttttttttttttattccaaaagattatccaaaacctcaaaatgaagatctattaagtgaacgcgctcccctccggtggcgtggtcaaactctacagccaaagaacagataatggcatttgtaagatgttgcacaatggcttccaaaaggcaaactgccctcacgtccaagtggacgtaaaggctaaacccttcanggtgaatctcctctataaacattccagcaccttcaaccatgcccaaataattttcatctcgccaccttatcaatatgtctctaagcaaatcccgaatattaagtccggccattgtaaaaatctgctccagagcgccctccaccttcagcctcaagcagcgaatcatgattgcaaaaattcaggttcctcacagacctgtataagattcaaaagcggaacattaacaaaaataccgcgatcccgtaggtcccttcgcagggccagctgaacataatcgtgcaggtctgcacggaccagcgcggccacttccccgccaggaaccatgacaaaagaacccacactgattatgacacgcatactcggagctatgctaaccagcgtagccccgatgtaagcttgttgcatgggcggcgatataaaatgcaaggtactgctcaaaaaatcaggcaaagcctcgcgcaaaaaagcaagcacatcgtagtcatgctcatgcagataaaggcaggtaagttccggaaccaccacagaaaaagacaccatttttctctcaaacatgtctgcgggttcctgcataaacacaaaataaaataacaaaaaaaaaaaaacatttaaacattagaagcctgtcttacaacaggaaaaacaacccttataagcataagacggactacggccatgccggcgtgaccgtaaaaaaactggtcaccgtgattaaaaagcaccaccgacagttcctcggtcatgtccggagtcataatgtaagactcggtaaacacatcaggttggttaacatcggtcagtgctaaaaagcgaccgaaatagcccgggggaatacatacccgcaggcgtagagacaacattacagcccccataggaggtataacaaaattaataggagagaaaaacacataaacccctgaaaaaccctcctgcccctaggcaaaatagcaccctcccgctccagaacaacatacagcgcttccacagcggcagccataacagtcagccttaccagtaaaaaaacctattaaaaaacaccactcgacacggcaccagctcaatcagtcacagtgtaaaaagggccaagtacagagcgagtatatataggactaaaaaatgacgtaacggttaaagtccacaaaaaccacccagaaaaccgcacgcgaacctacgcccagaaacgaaagccaaaaaacccacaacttcctcaaatcttcacttccgttttcccacgatacgtcacttcccattttaaaaaaaaactacaattcccaatacatgcaagttactccgccctaaaacctacgtcacccgccccgttcccacgccccgcgccacgtcacaaactccaccccctcattatcatattggcttcaatccaaaataaggtatattattgatgatggcgat

SEQ ID NO: 34 - DNA, 36205 bp, Artificial
  nucleic acid sequence of SC-Ad-FZF-C68-(delta)IIIF-(delta)E3-Spike-3X-L
  misc_feature (7190)..(7190): n is a, c, g, or t
  misc_feature (21571)..(21571): n is a, c, g, or t
  misc_feature (24507)..(24507): n is a, c, g, or t
  misc_feature (34795)..(34795): n is a, c, g, or t
cgccatcatcaataatataccttattttggattgaagccaatatgataatgagggggtggagtttgtgacgtggcgcggggcgtgggaacggggcgggtgacgtagtagtgtggcggaagtgtgatgttgtaagtgtggcggaacacatgtaagcgccggatgtggtaaaagtgacgtttttggtgtgcgccggtgtacacgggaagtgacaattttcgcgcggttttaggcggatgttgtagtaaatttgggcgtaaccaagtaatatttggccattttcgcgggaaaactgaataagaggaagtgaaatctgaataattctgtgttactcatagcgcgtaatatttgtctagggccgcggggactttgaccgtttacgtggagactcgcccaggtgtttttctcaggtgttttccgcgttccgggtcaaagttggcgttttattattatagtcagctgacgcgcagtgtatttatacccggtgagttcctcaagaggccactcttgagtgccagcgagtagagttttctcctccgagccgctccgacaccgggactgaaaatgagacatattatctgccacggaggtgttattaccgaagaaatggccgccagtcttttggaccagctgatcgaagaggtactggctgataatcttccacctcctagccattttgaaccacctacccttcacgaactgtatgatttagacgtgacggcccccgaagatcccaacgaggaggcggtttcgcagatttttcccgagtctgtaatgttggcggtgcaggaagggattgacttattcacttttccgccggcgcccggttctccggagccgcctcacctttcccggcagcccgagcagccggagcagagagccttgggtccggtttctatgccaaaccttgtgccggaggtgatcgatcttacctgccacgaggctggctttccacccagtgacgacgaggatgaagagggtgaggagtttgtgttagattatgtggagcaccccgggcacggttgcaggtcttgtcattatcaccggaggaatacgggggacccagatattatgtgttcgctttgctatatgaggacctgtggcatgtttgtctacagtaagtgaaaaattatgggcagtgggtgatagagtggtgggtttggtgtggtaattttttttttaatttttacagttttgtggtttaaagaattttgtattgtgattttttaaaaggtcctgtgtctgaacctgagcctgagcccgagccagaaccggagcctgcaagacctacccggcgtcctaaattggtgcctgctatcctgagacgcccgacatcacctgtgtctagagaatgcaatagtagtacggatagctgtgactccggtccttctaacacacctcctgagatacacccggtggtcccgctgtgccccattaaaccagttgccgtgagagttggtgggcgtcgccaggctgtggaatgtatcgaggacttgcttaacgagtctgggcaacctttggacttgagctgtaaacgccccaggccataaggtgtaaacctgtgattgcgtgtgtggttaacgcctttgtttgctgaatgagttgatgtaagtttaataaagggtgagataatgtttaacttgcatggcgtgttaaatggggcggggcttaaagggtatataatgcgccgtgggctaatcttggttacatctgacctcatggaggcttgggagtgtttggaagatttttctgctgtgcgtaacttgctggaacagagctctaacagtacctcttggttttggaggtttctgtggggctcctcccaggcaaagttagtctgcagaattaaggaggattacaagtgggaatttgaagagcttttgaaatcctgtggtgagctgtttgattctttgaatctgggtcaccaggcgcttttccaagagaaggtcatcaagactttggatttttccacaccggggcgcgctgcggctgctgttgcttttttgagttttataaaggataaatggagcgaagaaacccatctgagcggggggtacctgctggattttctggccatgcatctgtggagagcggtggtgagacacaagaatcgcctgctactgttgtcttccgtccgcccggcaataataccgacggaggagcaacagcaggaggaagccaggcggcggcggcggcaggagcagagcccatggaacccgagagccggcctggaccctcgggaatgaatgttgtacaggtggctgaactgtttccagaactgagacgcattttaaccattaacgaggatgggcaggggctaaagggggtaaagagggagcggggggcttctgaggctacagaggaggctaggaatctaacttttagcttaatgaccagacaccgtcctgagtgtgttacttttcagcagattaaggataattgcgctaatgagcttgatctgctggcgcagaagtattccataaagcagctgaccacttactggctgcagccaggggatgattttgaggaggctattagggtatatgcaaaggtggcacttaggccagattgcaagtacaagattagcaaacttgtaaatatcaggaattgttgctacatttctgggaacggggccgaggtggagatagatacggaggatagggtggcctttagatgtagcatgataaatatgtggccgggggtgcttggcatggacggggtggttattatgaatgtgaggtttactggtcccaattttagcggtacggttttcctggccaataccaatcttatcctacacggtgtaagcttctatgggtttaacaatacctgtgtggaagcctggaccgatgtaagggttcggggctgtgccttttactgctgctggaagggggtggtgtgtcgccccaaaagcagggcttcaattaagaaatgcctgtttgaaaggtgtaccttgggtatcctgtctgagggtaactccagggtgcgccacaatgtggcctccgactgtggttgctttatgctagtgaaaagcgtggctgtgattaagcataacatggtgtgtggcaactgcgaggacagggcctctcagatgctgacctgctcggacggcaactgtcacttgctgaagaccattcacgtagccagccactctcgcaaggcctggccagtgtttgagcacaacatactgacccgctgttccttgcatttgggtaacaggaggggggtgttcctaccttaccaatgcaatttgagtcacactaagatattgcttgagcccgagagcatgtccaaggtgaacctgaacggggtgtttgacatgaccatgaagatctggaaggtgctgaggtacgatgagacccgcaccaggtgcagaccctgcgagtgtggcggtaaacatattaggaaccagcctgtgatgctggatgtgaccgaggagctgaggcccgatcacttggtgctggcctgcacccgcgctgagtttggctctagcgatgaagatacagattgaggtactgaaatgtgtgggcgtggcttaagggtgggaaagaatatataaggtgggggtctcatgtagttttgtatctgttttgcagcagccgccgccatgagcgccaactcgtttgatggaagcattgtgagctcatatttgacaacgcgcatgcccccatgggccggggtgcgtcagaatgtgatgggctccagcattgatggtcgccccgtcctgcccgcaaactctactaccttgacctacgagaccgtgtctggaacgccgttggagactgcagcctccgccgccgcttcagccgctgcagccaccgcccgcgggattgtgactgactttgctttcctgagcccgcttgcaagcagtgcagcttcccgttcatccgcccgcgatgacaagttgacggctcttttggcacaattggattctttgacccgggaacttaatgtcgtttctcagcagctgttggatctgcgccagcaggtttctgccctgaaggcttcctcccctcccaatgcggtttaaaacataaataaaaaccagactctgtttggatttggatcaagcaagtgtcttgctgtctttatttaggggttttgcgcgcgcggtaggcccgggaccagcggtctcggtcgttgagggtcctgtgtattttttccaggacgtggtaaaggtgactctggatgttcagatacatgggcataagcccgtctctggggtggaggtagcaccactgcagagcttcatgctgcggggtggtgttgtagatgatccagtcgtagcaggagcgctgggcgtggtgcctaaaaatgtctttcagtagcaagctgattgccaggggcaggcccttggtgtaagtgtttacaaagcggttaagctgggatgggtgcatacgtggggatatgagatgcatcttggactgtatttttaggttggctatgttcccagccatatccctccggggattcatgttgtgcagaaccaccagcacagtgtatccggtgcacttgggaaatttgtcatgtagcttagaaggaaatgcgtggaagaacttggagacgcccttgtgacctccaagattttccatgcattcgtccataatgatggcaatgggcccacgggcggcggcctgggcgaagatatttctgggatcactaacgtcatagttgtgttccaggatgagatcgtcataggccatttttacaaagcgcgggcggagggtgccagactgcggtataatggttccatccggcccaggggcgtagttaccctcacagatttgcatttcccacgctttgagttcagatggggggatcatgtctacctgcggggcgatgaagaaaaccgtttccggggtaggggagatcagctgggaagaaagcaggttcctaagcagctgcgacttaccgcagccggtgggcccgtaaatcacacctattaccggctgcaactggtagttaagagagctgcagctgccgtcatccctgagcaggggggccacttcgttaagcatgtccctgacttgcatgttttccctgaccaaatccgccagaaggcgctcgccgcccagcgatagcagttcttgcaaggaagcaaagtttttcaacggtttgaggccgtccgccgtaggcatgcttttgagcgtttgaccaagcagttccaggcggtcccacagctcggtcacgtgctctacggcatctcgatccagcatatctcctcgtttcgcgggttggggcggctttcgctgtacggcagtagtcggtgctcgtccagacgggccagggtcatgtctttccacgggcgcagggtcctcgtcagcgtagtctgggtcacggtgaaggggtgcgctccgggttgcgcgctggccagggtgcgcttgaggctggtcctgctggtgctgaagcgctgccggtcttcgccctgcgcgtcggccaggtagcatttgaccatggtgtcatagtccagcccctccgcggcgtggcccttggcgcgcagcttgcccttggaggaggcgccgcacgaggggcagtgcagacttttaagggcgtagagcttgggcgcgagaaataccgattccggggagtaggcatccgcgccgcaggccccgcagacggtctcgcattccacgagccaggtgagctctggccgttcggggtcaaaaaccaggtttcccccatgctttttgatgcgtttcttacctctggtttccatgagccggtgtccacgctcggtgacgaaaaggctgtccgtgtccccgtatacagacttgagaggcctgtcctcgagcggtgttccgcggtcctcctcgtatagaaactcggaccactctgagacgaaggctcgcgtccaggccagcacgaaggaggctaagtgggaggggtagcggtcgttgtccactagggggtccactcgctccagggtgtgaagacacatgtcgccctcttcggcatcaaggaaggtgattggtttataggtgtaggccacgtgaccgggtgttcctgaaggggggctataaaagggggtgggggcgcgttcgtcctcactctcttccgcatcgctgtctgcgagggccagctgttggggtgagtactccctctcaaaagcgggcatgacttctgcgctaagattgtcagtttccaaaaacgaggaggatttgatattcacctggcccgcggtgatgcctttgagggtggccgcgtccatctggtcagaaaagacaatctttttgttgtcaagcttggtggcaaacgacccgtagagggcgttggacagcaacttggcgatggagcgcagggtttggtttttgtcgcgatcggcgcgctccttggccgcgatgtttagctgcacgtattcgcgcgcaacgcaccgccattcgggaaagacggtggtgcgctcgtcgggcactaggtgcacgcgccaaccgcggttgtgcagggtgacaaggtcaacgctggtggctacctctccgcgtaggcgctcgttggtccagcagaggcggccgcccttgcgcgagcagaatggcggtagtgggtctagctgcgtctcgtccggggggtctgcgtccacggtaaagaccccgggcagcaggcgcgcgtcgaagtagtctatcttgcatccttgcaagtctagcgcctgctgccatgcgcgggcggcaagcgcgcgctcgtatgggttgagtgggggaccccatggcatggggtgggtgagcgcggaggcgtacatgccgcaaatgtcgtaaacgtagaggggctctctgagtattccaagatatgtagggtagcatcttccaccgcggatgctggcgcgcacgtaatcgtatagttcgtgcgagggagcgaggaggtcgggaccgaggttgctacgggcgggctgctctgctcggaagactatctgcctgaagatggcatgtgagttggatgatatggttggacgctggaagacgttgaagctggcgtctgtgagacctaccgcgtcacgcacgaaggaggcgtaggagtcgcgcagcttgttgaccagctcggcggtgacctgcacgtctagggcgcagtagtccagggtttccttgatgatgtcatacttatcctgtcccttttttttccacagctcgcggttgaggacaaactcttcgcggtctttccagtactcttggatcggaaacccgtcggcctccgaacggtaagagcctancatgtagaactggttgacggcctggtaggcgcagcatcccttttctacgggtagcgcgtatgcctgcgcggccttccggagcgaggtgtgggtgagcgcaaaggtgtccctaaccatgactttgaggtactggtatttgaagtcagtgtcgtcgcatccgccctgctcccagagcaaaaagtccgtgcgctttttggaacgcgggtttggcagggcgaaggtgacatcgttgaagagtatctttcccgcgcgaggcataaagttgcgtgtgatgcggaagggtcccggcacctcggaacggttgttaattacctgggcggcgagcacgatctcgtcaaagccgttgatgttgtggcccacaatgtaaagttccaagaagcgcgggatgcccttgatggaaggcaattttttaagttcctcgtaggtgagctcttcaggggagctgagcccgtgctctgaaagggcccagtctgcaagatgagggttggaagcgacgaatgagctccacaggtcacgggccattagcatttgcaggtggtcgcgaaaggtcctaaactggcgacctatggccattttttctggggtgatgcagtagaaggtaagcgggtcttgttcccagcggtcccatccaaggtccgcggctaggtctcgcgcggcggtcactagaggctcatctccgccgaacttcatgaccagcatgaagggcacgagctgcttcccaaaggcccccatccaagtataggtctctacatcgtaggtgacaaagagacgctcggtgcgaggatgcgagccgatcgggaagaactggatctcccgccaccagttggaggagtggctgttgatgtggtgaaagtagaagtccctgcgacgggccgaacactcgtgctggcttttgtaaaaacgtgcgcagtactggcagcggtgcacgggctgtacatcctgcacgaggttgacctgacgaccgcgcacaaggaagcagagtgggaatttgagcccctcgcctggcgggtttggctggtggtcttctacttcggctgcttgtccttgaccgtctggctgctcgaggggagttacggtggatcggaccaccacgccgcgcgagcccaaagtccagatgtccgcgcgcggcggtcggagcttgatgacaacatcgcgcagatgggagctgtccatggtctggagctcccgcggcgtcaggtcaggcgggagctcctgcaggtttacctcgcatagccgggtcagggcgcgggctaggtccaggtgatacctgatttccaggggctggttggtggcggcgtcgatggcttgcaagaggccgcatccccgcggcgcgactacggtaccgcgcggcgggcggtgggccgcgggggtgtccttggatgatgcatctaaaagcggtgacgcgggcgggcccccggaggtagggggggctcgggacccgccgggagagggggcaggggcacgtcggcgccgcgcgcgggcaggagctggtgctgcgcgcggaggttgctggcgaacgcgacgacgcggcggttgatctcctgaatctggcgcctctgcgtgaagacgacgggcccggtgagcttgaacctgaaagagagttcgacagaatcaatttcggtgtcgttgacggcggcctggcgcaaaatctcctgcacgtctcctgagttgtcttgataggcgatctcggccatgaactgctcgatctcttcctcctggagatctccgcgtccggctcgctccacggtggcggcgaggtcgttggagatgcgggccatgagctgcgagaaggcgttgaggcctccctcgttccagacgcggctgtagaccacgcccccttcggcatcgcgggcgcgcatgaccacctgcgcgagattgagctccacgtgccgggcgaagacggcgtagtttcgcaggcgctgaaagaggtagttgagggtggtggcggtgtgttctgccacgaagaagtacataacccagcgccgcaacgtggattcgttgatatcccccaaggcctcaaggcgctccatggcctcgtagaagtccacggcgaagttgaaaaactgggagttgcgcgccgacacggttaactcctcctccagaagacggatgagctcggcgacagtgtcgcgcacctcgcgctcaaaggctacaggggcctcttcttcttcttcaatctcctcttccataagggcctccccttcttcttcttctggcggcggtgggggaggggggacacggcggcgacgacggcgcaccgggaggcggtcgacaaagcgctcgatcatctccccgcggcgacggcgcatggtctcggtgacggcgcggccgttctcgcgggggcgcagttggaagacgccgcccgtcatgtcccggttatgggttggcggggggctgccgtgcggcagggatacggcgctaacgatgcatctcaacaattgttgtgtaggtactccgccaccgagggacctgagcgagtccgcatcgaccggatcggaaaacctctcgagaaaggcgtctaaccagtcacagtcgcaaggtaggctgagcaccgtggcgggcggcagcgggcggcggtcggggttgtttctggcggaggtgctgctgatgatgtaattaaagtaggcggtcttgagacggcggatggtcgacagaagcaccatgtccttgggtccggcctgctgaatgcgcaggcggtcggccatgccccaggcttcgttttgacatcggcgcaggtctttgtagtagtcttgcatgagcctttctaccggcacttcttcttctccttcctcttgtcctgcatctcttgcatctatcgctgcggcggcggcggagtttggccgtaggtggcgccctcttcctcccatgcgtgtgaccccgaagcccctcatcggctgaagcagggccaggtcggcgacaacgcgctcggctaatatggcctgctgcacctgcgtgagggtagactggaagtcgtccatgtccacaaagcggtggtatgcgcccgtgttgatggtgtaagtgcagttggccataacggaccagttaacggtctggtgacccggctgcgagagctcggtgtacctgagacgcgagtaagcccttgagtcaaagacgtagtcgttgcaagtccgcaccaggtactggtatcccaccaaaaagtgcggcggcggctggcggtagaggggccagcgtagggtggccggggctccgggggcgaggtcttccaacataaggcgatgatatccgtagatgtacctggacatccaggtgatgccggcggcggtggtggaggcgcgcggaaagtcacggacgcggttccagatgttgcgcagcggcaaaaagtgctccatggtcgggacgctctggccggtcaggcgcgcgcagtcgttgacgctctagaccgtgcaaaaggagagcctgtaagcgggcactcttccgtggtctggtggataaattcgcaagggtatcatggcggacgaccggggttcgaaccccggatccggccgtccgccgtgatccatgcggttaccgcccgcgtgtcgaacccaggtgtgcgacgtcagacaacgggggagcgctccttttggcttccttccaggcgcggcggatgctgcgctagcttttttggccactggccgcgcgcggcgtaagcggttaggctggaaagcgaaagcattaagtggctcgctccctgtagccggagggttattttccaagggttgagtcgcgggacccccggttcgagtctcgggccggccggactgcggcgaacgggggtttgcctccccgtcatgcaagaccccgcttgcaaattcctccggaaacagggacgagccccttttttgcttttcccagatgcatccggtgctgcggcagatgcgcccccctcctcagcagcggcaagagcaagagcagcggcagacatgcagggcaccctcccctcctcctaccgcgtcaggaggggcgacatccgcggttgacgcggcagcagatggtgattacgaacccccgcggcgccgggcccggcactacctggacttggaggagggcgagggcctggcgcggctaggagcgccctctcctgagcggtacccaagggtgcagctgaagcgtgatacgcgtgaggcgtacgtgccgcggcagaacctgtttcgcgaccgcgagggagaggagcccgaggagatgcgggatcgaaagttccacgcagggcgcgagctgcggcatggcctgaatcgcgagcggttgctgcgcgaggaggactttgagcccgacgcgcgaaccgggattagtcccgcgcgcgcacacgtggcggccgccgacctggtaaccgcatacgagcagacggtgaaccaggagattaactttcaaaaaagctttaacaaccacgtgcgtacgcttgtggcgcgcgaggaggtggctataggactgatgcatctgtgggactttgtaagcgcgctggagcaaaacccaaatagcaagccgctcatggcgcagctgttccttatagtgcagcacagcagggacaacgaggcattcagggatgcgctgctaaacatagtagagcccgagggccgctggctgctcgatttgataaacatcctgcagagcatagtggtgcaggagcgcagcttgagcctggctgacaaggtggccgccatcaactattccatgcttagcctgggcaagttttacgcccgcaagatataccataccccttacgttcccatagacaaggaggtaaagatcgaggggttctacatgcgcatggcgctgaaggtgcttaccttgagcgacgacctgggcgtttatcgcaacgagcgcatccacaaggccgtgagcgtgagccggcggcgcgagctcagcgaccgcgagctgatgcacagcctgcaaagggccctggctggcacgggcagcggcgatagagaggccgagtcctactttgacgcgggcgctgacctgcgctgggccccaagccgacgcgccctggaggcagctggggccggacctgggctggcggtggcacccgcgcgcgctggcaacgtcggcggcgtggaggaatatgacgaggacgatgagtacgagccagaggacggcgagtactaagcggtgatgtttctgatcagtcgcggccgcgatatcgctagcgaagttcctattctctagaaagtataggaacttcggatcctctagagtcgaaaaaaaaaaagcatgatgcaaaataaaaaactcaccaaggccatggcaccgagcgttggttttcttgtattccccttagtatgcggcgcgcggcgatgtatgaggaaggtcctcctccctcctacgagagtgtggtgagcgcggcgccagtggcggcggcgctgggttctcccttcgatgctcccctggacccgccgtttgtgcctccgcggtacctgcggcctaccggggggagaaacagcatccgttactctgagttggcacccctattcgacaccacccgtgtgtacctggtggacaacaagtcaacggatgtggcatccctgaactaccagaacgaccacagcaactttctgaccacggtcattcaaaacaatgactacagcccgggggaggcaagcacacagaccatcaatcttgacgaccggtcgcactggggcggcgacctgaaaaccatcctgcataccaacatgccaaatgtgaacgagttcatgtttaccaataagtttaaggcgcgggtgatggtgtcgcgcttgcctactaaggacaatcaggtggagctgaaatacgagtgggtggagttcacgctgcccgagggcaactactccgagaccatgaccatagaccttatgaacaacgcgatcgtggagcactacttgaaagtgggcagacagaacggggttctggaaagcgacatcggggtaaagtttgacacccgcaacttcagactggggtttgaccccgtcactggtcttgtcatgcctggggtatatacaaacgaagccttccatccagacatcattttgctgccaggatgcggggtggacttcacccacagccgcctgagcaacttgttgggcatccgcaagcggcaacccttccaggagggctttaggatcacctacgatgatctggagggtggtaacattcccgcactgttggatgtggacgcctaccaggcgagcttgaaagatgacaccgaacagggcgggggtggcgcaggcggcagcaacagcagtggcagcggcgcggaagagaactccaacgcggcagccgcggcaatgcagccggtggaggacatgaacgatcatgccattcgcggcgacacctttgccacacgggctgaggagaagcgcgctgaggccgaagcagcggccgaagctgccgcccccgctgcgcaacccgaggtcgagaagcctcagaagaaaccggtgatcaaacccctgacagaggacagcaagaaacgcagttacaacctaataagcaatgacagcaccttcacccagtaccgcagctggtaccttgcatacaactacggcgaccctcagaccggaatccgctcatggaccctgctttgcactcctgacgtaacctgcggctcggagcaggtctactggtcgttgccagacatgatgcaagaccccgtgaccttccgctccacgcgccagatcagcaactttccggtggtgggcgccgagctgttgcccgtgcactccaagagcttctacaacgaccaggccgtctactcccaactcatccgccagtttacctctctgacccacgtgttcaatcgctttcccgagaaccagattttggcgcgcccgccagcccccaccatcaccaccgtcagtgaaaacgttcctgctctcacagatcacgggacgctaccgctgcgcaacagcatcggaggagtccagcgagtgaccattactgacgccagacgccgcacctgcccctacgtttacaaggccctgggcatagtctcgccgcgcgtcctatcgagccgcactttttgagcaagcatgtccatccttatatcgcccagcaataacacaggctggggcctgcgcttcccaagcaagatgtttggcggggccaagaagcgctccgaccaacacccagtgcgcgtgcgcgggcactaccgcgcgccctggggcgcgcacaaacgcggccgcactgggcgcaccaccgtcgatgacgccatcgacgcggtggtggaggaggcgcgcaactacacgcccacgccgccgccagtgtccaccgtggacgcggccattcagaccgtggtgcgcggagcccggcgctacgctaaaatgaagagacggcggaggcgcgtagcacgtcgccaccgccgccgacccggcactgccgcccaacgcgcggcggcggccctgcttaaccgcgcacgtcgcaccggccgacgggcggccatgcgagccgctcgaaggctggccgcgggtattgtcactgtgccccccaggtccaggcgacgagcggccgccgcagcagccgcggccattagtgttatgactcagggtcgcaggggcaacgtgtactgggtgcgcgactcggttagcggcctgcgcgtgcccgtgcgcacccgccccccgcgcaactagattgcaataaaaaactacttagactcgtactgttgtatgtatccagcggcggcggcgcgcatcgaagctatgtccaagcgcaaaatcaaagaagagatgctccaggtcatcgcgccggagatctatggccccccgaagaaggaagagcaggattacaagccccgaaagctaaagcgggtcaaaaagaaaaagaaagatgatgatgatgatgaacttgacgacgaggtggaactgttgcacgcgaccgcgcccaggcgacgggtacagtggaaaggtcgacgcgtaagacgtgttttgcgacccggcaccaccgtagtctttacgcccggtgagcgctccacccgcacctacaagcgcgtgtatgatgaggtgtacggcgacgaggacctgcttgagcaggccaacgagcgcctcggggagtttgcctacggaaagcggcataaggacatgctggcgttgccgctggacgagggcaacccaacacctagcctaaagcccgtgacactgcagcaggtgctgcccgcgcttgcaccgtccgaagaaaagcgcggcctaaagcgcgagtctggtgacttggcacccaccgtgcagctgatggtacccaagcgtcagcgactggaagatgtcttggaaaaaatgaccgtggagcctgggctggagcccgaggtccgcgtgcggccaatcaagcaggtggcaccgggactgggcgtgcagaccgtggacgttcagatacccaccaccagtagcactagtattgccactgccacagagggcatggagacacaaacgtccccggttgcctcggcggtggcagatgccgcggtgcaggcggccgctgcggccgcgtccaagacctctacggaggtgcaaacggacccgtggatgtttcgtgtttcagccccccggcgtccgcgccgttcaaggaagtacggcgccgccagcgcgctactgcccgaatatgccctacatccttccatcgcgcctacccccggctatcgtggctacacctaccgccccagaagacgagcaactacccgacgccgaaccaccactggaacccgccgccgccgtcgccgtcgccagcccgtgctggccccgatttccgtgcgcagggtggctcgcgaaggaggcaggaccctggtgctgccaacagcgcgctaccaccccagcatcgtttaaaagccggtctttgtggttcttgcagatatggccctcacctgccgcctccgtttcccggtgccgggattccgaggaagaatgcaccgtaggaggggcatggccggccacggcctgacgggcggcatgcgtcgtgcgcaccaccggcggcggcgcgcgtcgcaccgtcgcatgcgcgccggtatcctgcccctccttattccactgatcgccgcggcgattggcgccgtgcccggaattgcatccgtggccttgcaggcgcagagacactgattaaaaacaagttacatgtggaaaaatcaaaataaaagtctggactctcacgctcgcttggtcctgtaactattttgtagaatggaagacatcaactttgcgtcactggccccgcgacacggctcgcgcccgttcatgggaaactggcaagatatcggcaccagcaatatgagcggtggcgccttcagctggggctcgctgtggagcggcattaaaaatttcggttccgccgttaagaactatggcagcaaagcctggaacagcagcacaggccagatgctgagggacaagttgaaagagcaaaatttccaacaaaaggtggtagatggcctggcctctggcattagcggggtggtggacctggccaaccaggcagtgcaaaataagattaacagtaagcttgatccccgccctcccgtagaggagcctccaccggccgtggagacagtgtctccagaggggcgtggcgaaaagcgtccgcgacccgacagggaagaaactctggtgacgcaaatagacgagcctccctcgtacgaggaggcactaaagcaaggcctgcccaccacccgtcccatcgcgcccatggctaccggagtgctgggccagcacacacccgtaacgctggacctgcctccccccgccgacacccagcagaaacctgtgctgccaggcccgtccgccgttgttgtaacccgtcctagccgcgggtccctgcgccgcgccgccagcggtccgcgatcgttgcggcccgtagccagtggcaactggcaaagcacactgaacagcatcgtgggtctgggggtgcaatccctgaagcgccgacgatgcttctgatcgcggccgcgatatcgctagcgaagttcctattctctagaaagtataggaacttctcgagcacgtgttgacaattaatcatcggcatagtatatcggcatagtataatacgacaaggtgaggaactaaaccatggccaagttgaccagtgccgttccggtgctcaccgcgcgcgacgtcgccggagcggtcgagttctggaccgaccggctcgggttctcccgggacttcgtggaggacgacttcgccggtgtggtccgggacgacgtgaccctgttcatcagcgcggtccaggaccaggtggtgccggacaacaccctggcctgggtgtgggtgcgcggcctggacgagctgtacgccgagtggtcggaggtcgtgtccacgaacttccgggacgcctccgggccggccatgaccgagatcggcgagcagccgtgggggcgggagttcgccctgcgcgacccggccggcaactgcgtgcacttcgtggccgaggagcaggactgagaattcgaagttcctattctctagaaagtataggaacttctcgagcacgggatcctctagagtcgatagctaacgtgtcgtatgtgtgtcatgtatgcgtccatgtcgccgccagaggagctgctgagccgccgcgcgcccgctttccaagatggctaccccttcgatgatgccgcagtggtcttacatgcacatctcgggccaggacgcctcggagtacctgagccccgggctggtgcagtttgcccgcgccaccgagacgtacttcagcctgaataacaagtttagaaaccccacggtggcgcctacgcacgacgtgaccacagaccggtcccagcgtttgacgctgcggttcatccctgtggaccgtgaggatactgcgtactcgtacaaggcgcggttcaccctagctgtgggtgataaccgtgtgctggacatggcttccacgtactttgacatccgcggcgtgctggacaggggccctacttttaagccctactctggcactgcctacaacgccctggctcccaagggtgccccaaatccttgcgaatggacatataaagccgatggtgaaactgccacagaaaaaacccacgtatttgggcaggcgccttattctggtataaatattacaaaagatggtattcaacttggaactgacaccgatgatcagccaatctacgcagataaaacatttcaacctgaacctcaaataggagaatctcagtggtacgaaactgaaattaatcatgcagctgggagagtccttaaaaagactaccccaatgaaaccatgttacggttcatatgcaaaacccacaaatgaaaatggagggcaagcaaatgtgaaaacaggaacaggcactactaaagaatatgacatagacatgcaatttttcgacaacagaagtgcggctgctgctggcctagctccagaagtggtattgtacagtgaagatgtagatatagaaaccccagacactcatatttcttacatgcccactattaaggaaggtaactcacgagaactaatgggccaacaatctatgcccaacaggcctaattacattgcttttagggacaattttattggtctaatgtattacaacagcacgggtaatatgggtgttctggcgggccaagcatcgcagttgaatgctgttgtagatttgcaagacagaaacacagagctttcataccagcttttgcttgattccattggtgatagaaccaggtacttttctatgtggaatcaggctgttgacagctatgatccagatgttagaattattgaaaatcatggaactgaagatgaacttccaaattactgctttccactgggaggtgtgattagaacagatacttatcagggaattaaggctaatggaactgatcaaaccacatggaccaaagatgacagtgtcaatgatgctaatgaggaaataagagttggaaataattttgccatggaaatcaatctaaatgccaacctgtggagaaatttcctgtactccaacatagcgctgtatttgcccgacaagctaaagtacagtccttccaacgtaaaaatttctgataacccaaacacctacgactacatgaacaagcgagtggtggctcccgggttagtggactgctacattaaccttggagcacgctggtcccttgactatatggacaacgtcaacccatttaaccaccaccgcaatgctggcctgcgctaccgctcaatgttgctgggcaatggtcgctatgtgcccttccacatccaggtgcctcagaagttctttgccattaaaaacctccttctcctgccgggctcatacacctacgagtggaacttcaggaaggatgttaacatggttctgcagagctctctgggaaacgaccttagagttgacggggctagcattaagtttgacagcatttgtctttacgccaccttcttccccatggcccacaacacggcctccacgctggaagccatgctcagaaatgacaccaacgaccagtcctttaatgactacctttccgccgccaacatgctatatcccatacccgccaacgccaccaacgtgcccatctccatcccatcgcgcaactgggcagcatttcgcggttgggccttcacacgcttgaagacaaaggaaaccccttccctgggatcaggctacgacccttactacacctactctggctccataccataccttgacggaaccttctatcttaatcacacctttaagaaggtggccattacttttgactcttctgttagctggccgggcaacgaccgcctgcttactcccaatgagtttgagattaagcgctcagttgacggggagggctataacgtagctcagtgcaacatgacaaaggactggttcctagtgcagatgttggccaactacaatattggctaccagggcttctacattccagaaagctacaaagaccgcatgtactcgttcttcagaaacttccagcccatgagccggcaagtggtggacgatactaaatacaaagattatcagcaggttggaattatccaccagcataacaactcaggcttcgtaggctacctcgctcccaccatgcgcgagggacaagcttaccccgctaatgttccctacccactaataggcaaaaccgcggttgatagtattacccagaaaaagtttctttgcgaccgcaccctgtggcgcatccccttctccagtaactttatgtccatgggtgcgctcacagacctgggccaaaaccttctctacgcaaactccgcccacgcgctagacatgacctttgaggtggatcccatggacgagcccacccttctttatgttttgtttgaagtctttgacgtggtccgtgtgcaccagccgcaccgcggcgtcatcgagaccgtgtacctgcgcacgcccttctcggccggcaacgccacaacataaagaagcaagcaacatcaacaacagctgccgccatgggctccagtgagcaggaactgaaagccattgtcaaagatcttggttgtgggccatattttttgggcacctatgacaagcgcttcccaggctttgtttccccacacaagctcgcctgcgccatagttaacacggccggtcgcgagactgggggcgtacactggatggcctttgcctggaacccgcgctcaaaaacatgctacctctttgagccctttggcttttctgaccaacgtctcaagcaggtttaccagtttgagtacgagtcactcctgcgccgtagcgccattgcctcttcccccgaccgctgtataacgctggaaaagtccacccaaagcgtgcaggggcccaactcggccgcctgtggcctattctgctgcatgtttctccacgcctttgccaactggccccaaactcccatggatcacaaccccaccatgaaccttattaccggggtacccaactccatgcttaacagtccccaggtacagcccaccctgcgccgcaaccaggaacagctctacagcttcctggagcgccactcgccctacttccgcagccacagtgcgcaaattaggagcgccacttctttttgtcacttgaaaaacatgtaaaaataatgtactaggagacactttcaataaaggcaaatgtttttatttgtacactctcgggtgattatttacccccacccttgccgtctgcgccgtttaaaaatcaaaggggttctgccgcgcatcgctatgcgccactggcagggacacgttgcgatactggtgtttagtgctccacttaaactcaggcacaaccatccgcggcagctcggtgaagttttcactccacaggctgcgcaccatcaccaacgcgtttagcaggtcgggcgccgatatcttgaagtcgcagttggggcctccgccctgcgcgcgcgagttgcgatacacagggttacagcactggaacactatcagcgccgggtggtgcacgctggccagcacgctcttgtcggagatcanatccgcgtccaggtcctccgcgttgctcagggcgaacggagtcaactttggtagctgccttcccaaaaagggtgcatgcccaggctttgagttgcactcgcaccgtagtggcatcagaaggtgaccgtgcccagtctgggcgttaggatacagcgcctgcatgaaagccttgatctgcttaaaagccacctgagcctttgcgccttcagagaagaacatgccgcaagacttgccggaaaactgattggccggacaggccgcgtcatgcacgcagcaccttgcgtcggtgttggagatctgcaccacatttcggccccaccggttcttcacgatcttggccttgctagactgctccttcagcgcgcgctgcccgttttcgctcgtcacatccatttcaatcacgtgctccttatttatcataatgctcccgtgtagacacttaagctcgccttcgatctcagcgcagcggtgcagccacaacgcgcagcccgtgggctcgtggtgcttgtaggttacctctgcaaacgactgcaggtacgcctgcaggaatcgccccatcatcgtcacaaaggtcttgttgctggtgaaggtcagctgcaacccgcggtgctcctcgtttagccaggtcttgcatacggccgccagagcttccacttggtcaggcagtagcttgaagtttgcctttagatcgttatccacgtggtacttgtccatcaacgcgcgcgcagcctccatgcccttctcccacgcagacacgatcggcaggctcagcgggtttatcaccgtgctttcactttccgcttcactggactcttccttttcctcttgcatccgcataccccgcgccactgggtcgtcttcattcagccgccgcaccgtgcgcttacctcccttgccgtgcttgattagcaccggtgggttgctgaaacccaccatttgtagcgccacatcttctctttcttcctcgctgtccacgatcacctctggggatggcgggcgctcgggcttgggagaggggcgcttctttttctttttggacgcaatggccaaatccgccgtcgaggtcgatggccgcgggctgggtgtgcgcggcaccagcgcatcttgtgacgagtcttcttcgtcctcggactcgagacgccgcctcagccgcttttttgggggcgcgcggggaggcggcggcgacggcgacggggacgagacgtcctccatggttggtggacgtcgcgccgcaccgcgtccgcgctcgggggtggtttcgcgctgctcctcttcccgactggccatttccttctcctataggcagaaaaagatcatggagtcagtcgagaaggaggacagcctaaccgccccctttgagttcgccaccaccgcctccaccgatgccgccaacgcgcctaccaccttccccgtcgaggcacccccgcttgaggaggaggaagtgattatcgagcaggacccaggttttgtaagcgaagacgacgaagatcgctcagtaccaacagaggataaaaagcaagaccaggacgacgcagaggcaaacgaggaacaagtcgggcggggggaccaaaggcatggcgactacctagatgtgggagacgacgtgctgttgaagcatctgcagcgccagtgcgccattatctgcgacgcgttgcaagagcgcagcgatgtgcccctcgccatagcggatgtcagccttgcctacgaacgccacctgttctcaccgcgcgtaccccccaaacgccaagaaaacggcacatgcgagcccaacccgcgcctcaacttctaccccgtatttgccgtgccagaggtgcttgccacctatcacatctttttccaaaactgcaagatacccctatcctgccgtgccaaccgcagccgagcggacaagcagctggccttgcggcagggcgctgtcatacctgatatcgcctcgctcgacgaagtgccaaaaatctttgagggtcttggacgcgacgagaagcgcgcggcaaacgctctgcaacaagaaaacagcgaaaatgaaagtcactgtggagtgctggtggaacttgagggtgacaacgcgcgcctagccgtgctgaaacgcagcatcgaggtcacccactttgcctacccggcacttaacctaccccccaaggttatgagcacagtcatgagcgagctgatcgtgcgccgtgcacgacccctggagagggatgcaaacttgcaagaacaaaccgaggagggcctacccgcagttggcgatgagcagctggcgcgctggcttgagacgcgcgagcctgccgacttggaggagcgacgcaagctaatgatggccgcagtgcttgttaccgtggagcttgagtgcatgcagcggttctttgctgacccggagatgcagcgcaagctagaggaaacgttgcactacacctttcgccagggctacgtgcgccaggcctgcaaaatttccaacgtggagctctgcaacctggtctcctaccttggaattttgcacgaaaaccgccttgggcaaaacgtgcttcattccacgctcaagggcgaggcgcgccgcgactacgtccgcgactgcgtttacttatttctgtgctacacctggcaaacggccatgggcgtgtggcagcagtgcctggaggagcgcaacctgaaggagctgcagaagctgctaaagcaaaacttgaaggacctatggacggccttcaacgagcgctccgtggccgcgcacctggcggacattatcttccccgaacgcctgcttaaaaccctgcaacagggtctgccagacttcaccagtcaaagcatgttgcaaaactttaggaactttatcctagagcgttcaggaattctgcccgccacctgctgtgcgcttcctagcgactttgtgcccattaagtaccgtgaatgccctccgccgctttggggtcactgctaccttntgcagctagccaactaccttgcctaccactccgacatcatggaagacgtgagcggtgacggcctactggagtgtcactgtcgctgcaacctatgcaccccgcaccgctccctggtctgcaattcacaactgcttagcgaaagtcaaattatcggtacctttgagctgcagggtccctcgcctgacgaaaagtccgcggctccggggttgaaactcactccggggctgtggacgtcggcttaccttcgcaaatttgtacctgaggactaccacgcccacgagattaggttctacgaagaccaatcccgcccgccaaatgcggagcttaccgcctgcgtcattacccagggccacatccttggccaattgcaagccattaacaaagcccgccaagagtttctgctacgaaagggacggggggtttacttggacccccagtccggcgaggagctcaacccaatccccccgccgccgcagccctatcagcagccgcgggcccttgcttcccaggatggcacccaaaaagaagctgcagctgccgccgccgccacccacggacgaggaggaatactgggacagtcaggcagaggaggttttggacgaggaggaggagatgatggaagactgggacagcctagacgaggaagcttccgaggccgaagaggtgtcagacgaaacaccgtcaccctcggtcgcattcccctcgccggcgccccagaaatcggcaaccgttcccagcattgctacaacctccgctcctcaggcgccgccggcactgcccgttcgccgacccaaccgtagatgggacaccactggaaccagggccggtaagtctaagcagccgccgccgttagcccaagagcaacaacagcgccaaggctaccgctcgtggcgcgtgcacaagaacgccatagttgcttgcttgcaagactgtgggggcaacatctccttcgcccgccgctttcttctctaccatcacggcgtggccttcccccgtaacatcctgcattactaccgtcatctctacagcccctactgcaccggcggcagcggcagcaacagcagcggccacgcagaagcaaaggcgaccggatagcaagactctgacaaagcccaagaaatccacagcggcggcagcagcaggaggaggagcactgcgtctggcgcccaacgaacccgtatcgacccgcgagcttagaaacaggatttttcccactctgtatgctatatttcaacagagcaggggccaagaacaagagctgaaaataaaaaacaggtctctgcgctccctcacccgcagctgcctgtatcacaaaagcgaagatcagcttcggcgcacgctggaagacgcggaggctctcttcagcaaatactgcgcgctgactcttaaggactagtttcgcgccctttctcaaatttaagcgcgaaaactacgtcatctccagcggccacacccggcgccagcacctgtcgtcagcgccattatgagcaaggaaattcccacgccctacatgtggagttaccagccacaaatgggacttgcggctggagctgcccaagactactcaacccgaataaactacatgagcgcgggaccccacatgatatcccgggtcaacggaatccgcgcccaccgaaaccgaattctcctcgaacaggcggctattaccaccacacctcgtaataaccttaatccccgtagttggcccgctgccctggtgtaccaggaaagtcccgctcccaccactgtggtacttcccagagacgcccaggccgaagttcagatgactaactcaggggcgcagcttgcgggcggctttcgtcacagggtgcggtcgcccgggcagggtataactcacctgaaaatcagagggcgaggtattcagctcaacgacgagtcggtgagctcctctcttggtctccgtccggacgggacatttcagatcggcggcgctggccgctcttcatttacgccccgtcaggcgatcctaactctgcagacctcgtcctcggagccgcgctccggaggcattggaactctacaatttattgaggagttcgtgccttcggtttacttcaaccccttttctggacctcccggccactacccggaccagtttattcccaactttgacgcggtaaaagactcggcggacggctacgactgacagatctgagctcgcggccgcgatatcgctagcgaagttcctattctctagaaagtataggaacttcgatcctctagagtcgacctgcaggcatgcaagcttggcactgcaataaattacttacttaaaatcagtcagcaaatctttgtccagcttattcagcatcacctcctttccctcctcccaactctggtatttcagcagccttttagctgcgaactttctccaaagtctaaatgggatgtcaaattcctcatgttcttgtccctccgcacccactatcttcatattgttgcagatgaaacgcgccagaccgtctgaagacaccttcaaccctgtgtacccatatgacacggaaaccggccctccaactgtgcctttccttacccctccctttgtgtcgccaaatgggttccaagaaagtccccccggagtgctttctttgcgtctttcagaacctttggttacctcacacggcatgcttgcgctaaaaatgggcagcggcctgtccctggatcaggcaggcaaccttacatcaaatacaatcactgtttctcaaccgctaaaaaaaacaaagtccaatataactttggaaacatccgcgccccttacagtcagctcaggcgccctaaccatggccacaacttcgcctttggtggtctctgacaacactcttaccatgcaatcacaagcaccgctaaccgtgcaagactcaaaacttagcattgctaccaaagagccacttacagtgttagatggaaaactggccctgcagacatcagcccccctctctgccactgataacaacgccctcactatcactgcctcacctcctcttactactgcaaatggtagtctggctgttaccatggaaaacccactttacaacaacaatggaaaacttgggctcaaaattggcggtcctttgcaagtggccaccgactcacatgcactaacactaggtactggtcagggggttgcagttcataacaatttgctacatacaaaagttacaggcgcaatagggtttgatacatctggcaacatggaacttaaaactggagatggcctctatgtggatagcgccggtcctaaccaaaaactacatattaatctaaataccacaaaaggccttgcttttgacaacaccgcaataacaattaacgctggaaaagggttggaatttgaaacagactcctcaaacggaaatcccataaaaacaaaaattggatcaggcatacaatataataccaatggagctatggttgcaaaacttggaacaggcctcagttttgacagctccggagccataacaatgggcagcataaacaatgacagacttactctttggacaacaccagacccatccccaaattgcagaattgcttcagataaagactgcaagctaactctggcgctaacaaaatgtggcagtcaaattttgggcactgtttcagctttggcagtatcaggtaatatggcctccatcaatggaactctaagcagtgtaaacttggttcttagatttgatgacaacggagtgcttatgtcaaattcatcactggacaaacagtattggaactttagaaacggggactccactaacggtcaaccatacacttatgctgttgggtttatgccaaacctaaaagcttacccaaaaactcaaagtaaaactgcaaaaagtaatattgttagccaggtgtatcttaatggtgacaagtctaaaccattgcattttactattacgctaaatggaacagatgaaaccaaccaagtaagcaaatactcaatatcattcagttggtcctggaacagtggacaatacactaatgacaaatttgccaccaattcctataccttctcctacattgcccaggaataaagaatcgtgaacctgttgcatgttatgtttcaacgtgtttatttttcaattcgtattagtcatcgctattaccatggtgatgcggttttggcagtacatcaatgggcgtggatagcggtttgactcacggggatttccaagtctccaccccattgacgtcaatgggagtttgttttggcaccaaaatcaacgggactttccaaaatgtcgtaacaactccgccccattgacgcaaatgggcggtaggcgtgtacggtgggaggtctatataagcagagctggtttagtgaaccgtcagatccgctagagatccaccatgtttgtctttctcgtgctgctgcccctcgtgagcagccagtgcgtcaatctgacaacaaggacccagctgccccccgcctacaccaactccttcacaagaggcgtgtattaccccgataaggtcttcagatccagcgtcctccacagcacccaagatttgtttctgcctttcttcagcaacgtgacatggttccacgccattcatgtcagcggcacaaacggcacaaagaggtttgacaaccccgtgctccccttcaacgacggcgtgtacttcgccagcacagagaaatccaatatcattaggggctggatcttcggcacaacactggattccaagacccagtctctgctcattgtgaataacgccaccaacgtggtgattaaggtctgtgagtttcagttctgcaacgacccctttctgggagtctactaccacaagaataataagagctggatggagtccgagtttagggtgtacagctccgccaacaactgtaccttcgaatacgtgtcccagcctttcctcatggatctggagggcaagcaaggcaatttcaaaaatctgagagagttcgtgttcaaaaacattgatggatacttcaaaatctacagcaagcatacccccattaatctggtgagggatctgccccaaggattctccgctctggaacctctggtggatctgcccattggcattaacatcacaagattccagaccctcctcgccctccatagatcctatctgacccccggcgactcctccagcggatggacagccggagctgccgcctactacgtgggctatctgcagccaagaacctttctgctgaagtacaacgagaacggcaccatcacagacgctgtcgattgcgctctcgaccctctgagcgagaccaaatgcacactgaagagcttcaccgtggaaaagggcatctatcagaccagcaacttcagagtgcagcctaccgagagcattgtgaggtttcccaacatcaccaatctgtgtcctttcggcgaggtctttaatgccacaaggttcgcttccgtgtatgcttggaataggaagaggatcagcaattgcgtcgccgactattccgtcctctataacagcgcctccttctccaccttcaaatgttatggcgtgtcccccaccaagctcaacgacctctgcttcaccaatgtgtacgctgactccttcgtcattaggggcgacgaggtgaggcaaattgcccccggccagaccggcaagattgctgattacaactacaaactgcccgacgattttaccggctgcgtgatcgcttggaactccaacaatctggactccaaagtgggcggaaactacaattacctctacagactctttagaaaaagcaatctgaagcccttcgagagagacatctccaccgaaatctaccaagccggaagcacaccttgcaatggcgtcgagggatttaactgctacttccctctgcagagctacggctttcaacctaccaacggcgtcggatatcaaccctatagggtggtcgtgctgagctttgaactgctgcatgctcccgccaccgtctgcggacctaagaagagcaccaatctcgtcaaaaacaagtgcgtgaacttcaacttcaatggactgaccggcaccggcgtgctgaccgagagcaataagaagtttctgcccttccagcagttcggaagggatattgccgataccacagatgctgtgagggacccccaaaccctcgagattctggatatcaccccttgcagcttcggaggagtgtccgtgatcacccccggaacaaacacctccaatcaagtggctgtgctgtaccaagacgtgaactgcacagaagtccccgtggccatccatgccgaccagctgacccctacatggagagtgtactccaccggcagcaatgtgttccagacaagagccggatgcctcattggagctgaacacgtcaacaacagctacgagtgcgacattcccatcggcgccggcatttgtgcctcctatcagacccagaccaacagcccaagaagggctagaagcgtcgcttcccaatccatcattgcctacaccatgtctctgggagccgaaaactccgtcgcctactccaacaatagcatcgccatccccaccaattttaccatctccgtgaccacagagattctgcccgtgtccatgacaaagacatccgtggactgcaccatgtacatctgtggcgacagcaccgagtgtagcaatctgctgctgcaatatggcagcttctgcacccagctgaacagagccctcaccggcatcgccgtcgaacaagacaagaacacccaagaggtgttcgcccaagtgaagcaaatctacaagaccccccctatcaaagatttcggaggattcaactttagccagattctgcccgatcctagcaagccttccaagaggagcttcatcgaggatctgctgtttaataaggtgacactggccgacgctggcttcattaaacagtacggcgattgtctgggcgacatcgctgctagggatctgatctgcgctcagaagttcaacggactgacagtcctccctcctctgctgaccgacgagatgatcgctcagtataccagcgctctgctggctggaaccattaccagcggctggacattcggcgctggagccgccctccaaattccctttgccatgcagatggcctatagattcaacggcattggcgtcacccaaaatgtgctgtatgaaaatcagaagctgattgctaaccaattcaatagcgccattggcaagatccaagactctctgagctccacagccagcgccctcggaaagctgcaagacgtggtgaatcaaaacgcccaagctctgaacacactggtgaaacagctcagcagcaactttggagccatcagcagcgtgctcaatgatatcctctctaggctggacaaagtggaggccgaagtccagatcgatagactcatcaccggcagactccaatctctgcagacatacgtcacccaacagctcattagagctgccgaaatcagagcctccgccaatctggccgccaccaagatgtccgagtgcgtgctgggacagagcaagagagtggacttctgtggcaagggataccatctgatgagcttcccccagagcgctccccatggagtggtctttctgcatgtcacatacgtgcccgcccaagagaagaacttcaccaccgctcccgccatttgccacgatggaaaggcccactttcccagagaaggagtgttcgtgagcaacggcacacactggtttgtcacccagagaaatttttacgagccccagattatcaccaccgacaacaccttcgtgtccggaaactgcgatgtcgtgattggcatcgtgaacaacacagtctacgaccctctgcagcccgaactcgacagcttcaaggaagagctggacaagtacttcaagaatcacacatcccccgacgtggatctgggcgacattagcggcattaatgcctccgtcgtcaacattcagaaggagattgatagactgaatgaagtcgccaagaacctcaatgagtctctgattgatctgcaagagctgggcaagtacgagcaatacatcaaatggccttggtacatctggctgggattcatcgctggactcatcgccatcgtgatggtcaccattatgctgtgttgcatgaccagctgctgcagctgtctgaagggctgctgcagctgcggaagctgctgcaagtttgacgaagacgactccgagcccgtgctgaagggcgtcaagctgcattatacataaactagtgctggaattcgcccttatagagtgctggaattcgcccttatagagtgctggaattcgcccttatatctagtaacggccgccagtgtgctggaattcgcccttataacttcgtatagcatacattatacgaagttataagggcgaattctgcagatatccatcctttaaaaaacctcccacacctccccctgaacctgaaacataaaatgaatgcaattgttgttgttaacttgtttattgcagcttataatggttacaaataaagcaatagcatcacaaatttcacaaataaagcatttttttcactgcattctagttgtggtttgtccaaactcatcaatgtatcttaacaacgtgtttatttttcaattgcagaaagaattgcagaaaatttcaagtcatttttcattcagtagtatagccccaccaccacatagcttatactaatcaccgtaccttaatcaaactcacagaaccctagtattcaacctgccacctccctcccaacacacagagtacacagtcctttctccccggctggccttaaacagcatcatatcatgggtaacagacatattcttaggtgttatattccacacggtctcctgtcgagccaaacgctcatcagtgatgttaataaactccccgggcagctcgcttaagttcatgtcgctgtccagctgctgagccacaggctgctgtccaacttgcggttgctcaacgggcggcgaaggagaagtccacgcctacatgggggtagagtcataatcgtgcatcaggatagggcggtggtgctgcagcagcgcgcgaataaactgctgccgccgccgctccgtcctgcaggaatacaacatggcagtggtctcctcagcgatgattcgcaccgcccgcagcataaggcgccttgtcctccgggcacagcagcgcaccctgatctcacttaagtcagcacagtaactgcagcacagtaccacaatattgtttaaaatcccacagtgcaaggcgctgtatccaaagctcatggcggggaccacagaacccacgtggccatcataccacaagcgcaggtagattaagtggcgacccctcataaacacgctggacataaacattacctcttttggcatgttgtaattcaccacctcccggtaccatataaacctctgattaaacatggcgccatccaccaccatcctaaaccagctggccaaaacctgcccgccggctatgcactgcagggaaccgggactggaacaatgacagtggagagcccaggactcgtaaccatggatcatcatgctcgtcatgatatcaatgttggcacaacacaggcacacgtgcatacacttcctcaggattacaagctcctcccgcgtcagaaccatatcccagggaacaacccattcctgaatcagcgtaaatcccacactgcagggaagacctcgcacgtaactcacgttgtgcattgtcaaagtgttacattcgggcagcagcggatgatcctccagtatggtagcgcgtgtctctgtctcaaaaggaggtaggcgatccctactgtacggagtgcgccgagacaaccgagatcgtgttggtcgtagtgtcatgccaaatggaacgccggacgtagtcatatttcctgaagcaaaaccaggtgcgggcgtgacaaacagatctgcgtctccggtctcgtcgcttagctcgctctgtgtagtagttgtagtatatccactctctcaaagcatccaggcgccccctggcttcgggttctatgtaaactccttcatgcgccgctgccctgataacatccaccaccgcagaataagccacacccagccaacctacacattcgttctgcgagtcacacacgggaggagcgggaagagctggaagaaccatgttttttttttttattccaaaagattatccaaaacctcaaaatgaagatctattaagtgaacgcgctcccctccggtggcgtggtcaaactctacagccaaagaacagataatggcatttgtaagatgttgcacaatggcttccaaaaggcaaactgccctcacgtccaagtggacgtaaaggctaaacccttcanggtgaatctcctctataaacattccagcaccttcaaccatgcccaaataattttcatctcgccaccttatcaatatgtctctaagcaaatcccgaatattaagtccggccattgtaaaaatctgctccagagcgccctccaccttcagcctcaagcagcgaatcatgattgcaaaaattcaggttcctcacagacctgtataagattcaaaagcggaacattaacaaaaataccgcgatcccgtaggtcccttcgcagggccagctgaacataatcgtgcaggtctgcacggaccagcgcggccacttccccgccaggaaccatgacaaaagaacccacactgattatgacacgcatactcggagctatgctaaccagcgtagccccgatgtaagcttgttgcatgggcggcgatataaaatgcaaggtactgctcaaaaaatcaggcaaagcctcgcgcaaaaaagcaagcacatcgtagtcatgctcatgcagataaaggcaggtaagttccggaaccaccacagaaaaagacaccatttttctctcaaacatgtctgcgggttcctgcataaacacaaaataaaataacaaaaaaaaaaaaacatttaaacattagaagcctgtcttacaacaggaaaaacaacccttataagcataagacggactacggccatgccggcgtgaccgtaaaaaaactggtcaccgtgattaaaaagcaccaccgacagttcctcggtcatgtccggagtcataatgtaagactcggtaaacacatcaggttggttaacatcggtcagtgctaaaaagcgaccgaaatagcccgggggaatacatacccgcaggcgtagagacaacattacagcccccataggaggtataacaaaattaataggagagaaaaacacataaacccctgaaaaaccctcctgcccctaggcaaaatagcaccctcccgctccagaacaacatacagcgcttccacagcggcagccataacagtcagccttaccagtaaaaaaacctattaaaaaacaccactcgacacggcaccagctcaatcagtcacagtgtaaaaagggccaagtacagagcgagtatatataggactaaaaaatgacgtaacggttaaagtccacaaaaaccacccagaaaaccgcacgcgaacctacgcccagaaacgaaagccaaaaaacccacaacttcctcaaatcttcacttccgttttcccacgatacgtcacttcccattttaaaaaaaaactacaattcccaatacatgcaagttactccgccctaaaacctacgtcacccgccccgttcccacgccccgcgccacgtcacaaactccaccccctcattatcatattggcttcaatccaaaataaggtatattattgatgatggcgat

SEQ ID NO: 35 - DNA, 36205 bp, Artificial
  nucleic acid sequence of SC-Ad-FZF-C68-(delta)IIIF-(delta)E3-SpikePP-3X-L
  misc_feature (7190)..(7190): n is a, c, g, or t
  misc_feature (21571)..(21571): n is a, c, g, or t
  misc_feature (24507)..(24507): n is a, c, g, or t
  misc_feature (34795)..(34795): n is a, c, g, or t
cgccatcatcaataatataccttattttggattgaagccaatatgataatgagggggtggagtttgtgacgtggcgcggggcgtgggaacggggcgggtgacgtagtagtgtggcggaagtgtgatgttgtaagtgtggcggaacacatgtaagcgccggatgtggtaaaagtgacgtttttggtgtgcgccggtgtacacgggaagtgacaattttcgcgcggttttaggcggatgttgtagtaaatttgggcgtaaccaagtaatatttggccattttcgcgggaaaactgaataagaggaagtgaaatctgaataattctgtgttactcatagcgcgtaatatttgtctagggccgcggggactttgaccgtttacgtggagactcgcccaggtgtttttctcaggtgttttccgcgttccgggtcaaagttggcgttttattattatagtcagctgacgcgcagtgtatttatacccggtgagttcctcaagaggccactcttgagtgccagcgagtagagttttctcctccgagccgctccgacaccgggactgaaaatgagacatattatctgccacggaggtgttattaccgaagaaatggccgccagtcttttggaccagctgatcgaagaggtactggctgataatcttccacctcctagccattttgaaccacctacccttcacgaactgtatgatttagacgtgacggcccccgaagatcccaacgaggaggcggtttcgcagatttttcccgagtctgtaatgttggcggtgcaggaagggattgacttattcacttttccgccggcgcccggttctccggagccgcctcacctttcccggcagcccgagcagccggagcagagagccttgggtccggtttctatgccaaaccttgtgccggaggtgatcgatcttacctgccacgaggctggctttccacccagtgacgacgaggatgaagagggtgaggagtttgtgttagattatgtggagcaccccgggcacggttgcaggtcttgtcattatcaccggaggaatacgggggacccagatattatgtgttcgctttgctatatgaggacctgtggcatgtttgtctacagtaagtgaaaaattatgggcagtgggtgatagagtggtgggtttggtgtggtaattttttttttaatttttacagttttgtggtttaaagaattttgtattgtgattttttaaaaggtcctgtgtctgaacctgagcctgagcccgagccagaaccggagcctgcaagacctacccggcgtcctaaattggtgcctgctatcctgagacgcccgacatcacctgtgtctagagaatgcaatagtagtacggatagctgtgactccggtccttctaacacacctcctgagatacacccggtggtcccgctgtgccccattaaaccagttgccgtgagagttggtgggcgtcgccaggctgtggaatgtatcgaggacttgcttaacgagtctgggcaacctttggacttgagctgtaaacgccccaggccataaggtgtaaacctgtgattgcgtgtgtggttaacgcctttgtttgctgaatgagttgatgtaagtttaataaagggtgagataatgtttaacttgcatggcgtgttaaatggggcggggcttaaagggtatataatgcgccgtgggctaatcttggttacatctgacctcatggaggcttgggagtgtttggaagatttttctgctgtgcgtaacttgctggaacagagctctaacagtacctcttggttttggaggtttctgtggggctcctcccaggcaaagttagtctgcagaattaaggaggattacaagtgggaatttgaagagcttttgaaatcctgtggtgagctgtttgattctttgaatctgggtcaccaggcgcttttccaagagaaggtcatcaagactttggatttttccacaccggggcgcgctgcggctgctgttgcttttttgagttttataaaggataaatggagcgaagaaacccatctgagcggggggtacctgctggattttctggccatgcatctgtggagagcggtggtgagacacaagaatcgcctgctactgttgtcttccgtccgcccggcaataataccgacggaggagcaacagcaggaggaagccaggcggcggcggcggcaggagcagagcccatggaacccgagagccggcctggaccctcgggaatgaatgttgtacaggtggctgaactgtttccagaactgagacgcattttaaccattaacgaggatgggcaggggctaaagggggtaaagagggagcggggggcttctgaggctacagaggaggctaggaatctaacttttagcttaatgaccagacaccgtcctgagtgtgttacttttcagcagattaaggataattgcgctaatgagcttgatctgctggcgcagaagtattccataaagcagctgaccacttactggctgcagccaggggatgattttgaggaggctattagggtatatgcaaaggtggcacttaggccagattgcaagtacaagattagcaaacttgtaaatatcaggaattgttgctacatttctgggaacggggccgaggtggagatagatacggaggatagggtggcctttagatgtagcatgataaatatgtggccgggggtgcttggcatggacggggtggttattatgaatgtgaggtttactggtcccaattttagcggtacggttttcctggccaataccaatcttatcctacacggtgtaagcttctatgggtttaacaatacctgtgtggaagcctggaccgatgtaagggttcggggctgtgccttttactgctgctggaagggggtggtgtgtcgccccaaaagcagggcttcaattaagaaatgcctgtttgaaaggtgtaccttgggtatcctgtctgagggtaactccagggtgcgccacaatgtggcctccgactgtggttgctttatgctagtgaaaagcgtggctgtgattaagcataacatggtgtgtggcaactgcgaggacagggcctctcagatgctgacctgctcggacggcaactgtcacttgctgaagaccattcacgtagccagccactctcgcaaggcctggccagtgtttgagcacaacatactgacccgctgttccttgcatttgggtaacaggaggggggtgttcctaccttaccaatgcaatttgagtcacactaagatattgcttgagcccgagagcatgtccaaggtgaacctgaacggggtgtttgacatgaccatgaagatctggaaggtgctgaggtacgatgagacccgcaccaggtgcagaccctgcgagtgtggcggtaaacatattaggaaccagcctgtgatgctggatgtgaccgaggagctgaggcccgatcacttggtgctggcctgcacccgcgctgagtttggctctagcgatgaagatacagattgaggtactgaaatgtgtgggcgtggcttaagggtgggaaagaatatataaggtgggggtctcatgtagttttgtatctgttttgcagcagccgccgccatgagcgccaactcgtttgatggaagcattgtgagctcatatttgacaacgcgcatgcccccatgggccggggtgcgtcagaatgtgatgggctccagcattgatggtcgccccgtcctgcccgcaaactctactaccttgacctacgagaccgtgtctggaacgccgttggagactgcagcctccgccgccgcttcagccgctgcagccaccgcccgcgggattgtgactgactttgctttcctgagcccgcttgcaagcagtgcagcttcccgttcatccgcccgcgatgacaagttgacggctcttttggcacaattggattctttgacccgggaacttaatgtcgtttctcagcagctgttggatctgcgccagcaggtttctgccctgaaggcttcctcccctcccaatgcggtttaaaacataaataaaaaccagactctgtttggatttggatcaagcaagtgtcttgctgtctttatttaggggttttgcgcgcgcggtaggcccgggaccagcggtctcggtcgttgagggtcctgtgtattttttccaggacgtggtaaaggtgactctggatgttcagatacatgggcataagcccgtctctggggtggaggtagcaccactgcagagcttcatgctgcggggtggtgttgtagatgatccagtcgtagcaggagcgctgggcgtggtgcctaaaaatgtctttcagtagcaagctgattgccaggggcaggcccttggtgtaagtgtttacaaagcggttaagctgggatgggtgcatacgtggggatatgagatgcatcttggactgtatttttaggttggctatgttcccagccatatccctccggggattcatgttgtgcagaaccaccagcacagtgtatccggtgcacttgggaaatttgtcatgtagcttagaaggaaatgcgtggaagaacttggagacgcccttgtgacctccaagattttccatgcattcgtccataatgatggcaatgggcccacgggcggcggcctgggcgaagatatttctgggatcactaacgtcatagttgtgttccaggatgagatcgtcataggccatttttacaaagcgcgggcggagggtgccagactgcggtataatggttccatccggcccaggggcgtagttaccctcacagatttgcatttcccacgctttgagttcagatggggggatcatgtctacctgcggggcgatgaagaaaaccgtttccggggtaggggagatcagctgggaagaaagcaggttcctaagcagctgcgacttaccgcagccggtgggcccgtaaatcacacctattaccggctgcaactggtagttaagagagctgcagctgccgtcatccctgagcaggggggccacttcgttaagcatgtccctgacttgcatgttttccctgaccaaatccgccagaaggcgctcgccgcccagcgatagcagttcttgcaaggaagcaaagtttttcaacggtttgaggccgtccgccgtaggcatgcttttgagcgtttgaccaagcagttccaggcggtcccacagctcggtcacgtgctctacggcatctcgatccagcatatctcctcgtttcgcgggttggggcggctttcgctgtacggcagtagtcggtgctcgtccagacgggccagggtcatgtctttccacgggcgcagggtcctcgtcagcgtagtctgggtcacggtgaaggggtgcgctccgggttgcgcgctggccagggtgcgcttgaggctggtcctgctggtgctgaagcgctgccggtcttcgccctgcgcgtcggccaggtagcatttgaccatggtgtcatagtccagcccctccgcggcgtggcccttggcgcgcagcttgcccttggaggaggcgccgcacgaggggcagtgcagacttttaagggcgtagagcttgggcgcgagaaataccgattccggggagtaggcatccgcgccgcaggccccgcagacggtctcgcattccacgagccaggtgagctctggccgttcggggtcaaaaaccaggtttcccccatgctttttgatgcgtttcttacctctggtttccatgagccggtgtccacgctcggtgacgaaaaggctgtccgtgtccccgtatacagacttgagaggcctgtcctcgagcggtgttccgcggtcctcctcgtatagaaactcggaccactctgagacgaaggctcgcgtccaggccagcacgaaggaggctaagtgggaggggtagcggtcgttgtccactagggggtccactcgctccagggtgtgaagacacatgtcgccctcttcggcatcaaggaaggtgattggtttataggtgtaggccacgtgaccgggtgttcctgaaggggggctataaaagggggtgggggcgcgttcgtcctcactctcttccgcatcgctgtctgcgagggccagctgttggggtgagtactccctctcaaaagcgggcatgacttctgcgctaagattgtcagtttccaaaaacgaggaggatttgatattcacctggcccgcggtgatgcctttgagggtggccgcgtccatctggtcagaaaagacaatctttttgttgtcaagcttggtggcaaacgacccgtagagggcgttggacagcaacttggcgatggagcgcagggtttggtttttgtcgcgatcggcgcgctccttggccgcgatgtttagctgcacgtattcgcgcgcaacgcaccgccattcgggaaagacggtggtgcgctcgtcgggcactaggtgcacgcgccaaccgcggttgtgcagggtgacaaggtcaacgctggtggctacctctccgcgtaggcgctcgttggtccagcagaggcggccgcccttgcgcgagcagaatggcggtagtgggtctagctgcgtctcgtccggggggtctgcgtccacggtaaagaccccgggcagcaggcgcgcgtcgaagtagtctatcttgcatccttgcaagtctagcgcctgctgccatgcgcgggcggcaagcgcgcgctcgtatgggttgagtgggggaccccatggcatggggtgggtgagcgcggaggcgtacatgccgcaaatgtcgtaaacgtagaggggctctctgagtattccaagatatgtagggtagcatcttccaccgcggatgctggcgcgcacgtaatcgtatagttcgtgcgagggagcgaggaggtcgggaccgaggttgctacgggcgggctgctctgctcggaagactatctgcctgaagatggcatgtgagttggatgatatggttggacgctggaagacgttgaagctggcgtctgtgagacctaccgcgtcacgcacgaaggaggcgtaggagtcgcgcagcttgttgaccagctcggcggtgacctgcacgtctagggcgcagtagtccagggtttccttgatgatgtcatacttatcctgtcccttttttttccacagctcgcggttgaggacaaactcttcgcggtctttccagtactcttggatcggaaacccgtcggcctccgaacggtaagagcctancatgtagaactggttgacggcctggtaggcgcagcatcccttttctacgggtagcgcgtatgcctgcgcggccttccggagcgaggtgtgggtgagcgcaaaggtgtccctaaccatgactttgaggtactggtatttgaagtcagtgtcgtcgcatccgccctgctcccagagcaaaaagtccgtgcgctttttggaacgcgggtttggcagggcgaaggtgacatcgttgaagagtatctttcccgcgcgaggcataaagttgcgtgtgatgcggaagggtcccggcacctcggaacggttgttaattacctgggcggcgagcacgatctcgtcaaagccgttgatgttgtggcccacaatgtaaagttccaagaagcgcgggatgcccttgatggaaggcaattttttaagttcctcgtaggtgagctcttcaggggagctgagcccgtgctctgaaagggcccagtctgcaagatgagggttggaagcgacgaatgagctccacaggtcacgggccattagcatttgcaggtggtcgcgaaaggtcctaaactggcgacctatggccattttttctggggtgatgcagtagaaggtaagcgggtcttgttcccagcggtcccatccaaggtccgcggctaggtctcgcgcggcggtcactagaggctcatctccgccgaacttcatgaccagcatgaagggcacgagctgcttcccaaaggcccccatccaagtataggtctctacatcgtaggtgacaaagagacgctcggtgcgaggatgcgagccgatcgggaagaactggatctcccgccaccagttggaggagtggctgttgatgtggtgaaagtagaagtccctgcgacgggccgaacactcgtgctggcttttgtaaaaacgtgcgcagtactggcagcggtgcacgggctgtacatcctgcacgaggttgacctgacgaccgcgcacaaggaagcagagtgggaatttgagcccctcgcctggcgggtttggctggtggtcttctacttcggctgcttgtccttgaccgtctggctgctcgaggggagttacggtggatcggaccaccacgccgcgcgagcccaaagtccagatgtccgcgcgcggcggtcggagcttgatgacaacatcgcgcagatgggagctgtccatggtctggagctcccgcggcgtcaggtcaggcgggagctcctgcaggtttacctcgcatagccgggtcagggcgcgggctaggtccaggtgatacctgatttccaggggctggttggtggcggcgtcgatggcttgcaagaggccgcatccccgcggcgcgactacggtaccgcgcggcgggcggtgggccgcgggggtgtccttggatgatgcatctaaaagcggtgacgcgggcgggcccccggaggtagggggggctcgggacccgccgggagagggggcaggggcacgtcggcgccgcgcgcgggcaggagctggtgctgcgcgcggaggttgctggcgaacgcgacgacgcggcggttgatctcctgaatctggcgcctctgcgtgaagacgacgggcccggtgagcttgaacctgaaagagagttcgacagaatcaatttcggtgtcgttgacggcggcctggcgcaaaatctcctgcacgtctcctgagttgtcttgataggcgatctcggccatgaactgctcgatctcttcctcctggagatctccgcgtccggctcgctccacggtggcggcgaggtcgttggagatgcgggccatgagctgcgagaaggcgttgaggcctccctcgttccagacgcggctgtagaccacgcccccttcggcatcgcgggcgcgcatgaccacctgcgcgagattgagctccacgtgccgggcgaagacggcgtagtttcgcaggcgctgaaagaggtagttgagggtggtggcggtgtgttctgccacgaagaagtacataacccagcgccgcaacgtggattcgttgatatcccccaaggcctcaaggcgctccatggcctcgtagaagtccacggcgaagttgaaaaactgggagttgcgcgccgacacggttaactcctcctccagaagacggatgagctcggcgacagtgtcgcgcacctcgcgctcaaaggctacaggggcctcttcttcttcttcaatctcctcttccataagggcctccccttcttcttcttctggcggcggtgggggaggggggacacggcggcgacgacggcgcaccgggaggcggtcgacaaagcgctcgatcatctccccgcggcgacggcgcatggtctcggtgacggcgcggccgttctcgcgggggcgcagttggaagacgccgcccgtcatgtcccggttatgggttggcggggggctgccgtgcggcagggatacggcgctaacgatgcatctcaacaattgttgtgtaggtactccgccaccgagggacctgagcgagtccgcatcgaccggatcggaaaacctctcgagaaaggcgtctaaccagtcacagtcgcaaggtaggctgagcaccgtggcgggcggcagcgggcggcggtcggggttgtttctggcggaggtgctgctgatgatgtaattaaagtaggcggtcttgagacggcggatggtcgacagaagcaccatgtccttgggtccggcctgctgaatgcgcaggcggtcggccatgccccaggcttcgttttgacatcggcgcaggtctttgtagtagtcttgcatgagcctttctaccggcacttcttcttctccttcctcttgtcctgcatctcttgcatctatcgctgcggcggcggcggagtttggccgtaggtggcgccctcttcctcccatgcgtgtgaccccgaagcccctcatcggctgaagcagggccaggtcggcgacaacgcgctcggctaatatggcctgctgcacctgcgtgagggtagactggaagtcgtccatgtccacaaagcggtggtatgcgcccgtgttgatggtgtaagtgcagttggccataacggaccagttaacggtctggtgacccggctgcgagagctcggtgtacctgagacgcgagtaagcccttgagtcaaagacgtagtcgttgcaagtccgcaccaggtactggtatcccaccaaaaagtgcggcggcggctggcggtagaggggccagcgtagggtggccggggctccgggggcgaggtcttccaacataaggcgatgatatccgtagatgtacctggacatccaggtgatgccggcggcggtggtggaggcgcgcggaaagtcacggacgcggttccagatgttgcgcagcggcaaaaagtgctccatggtcgggacgctctggccggtcaggcgcgcgcagtcgttgacgctctagaccgtgcaaaaggagagcctgtaagcgggcactcttccgtggtctggtggataaattcgcaagggtatcatggcggacgaccggggttcgaaccccggatccggccgtccgccgtgatccatgcggttaccgcccgcgtgtcgaacccaggtgtgcgacgtcagacaacgggggagcgctccttttggcttccttccaggcgcggcggatgctgcgctagcttttttggccactggccgcgcgcggcgtaagcggttaggctggaaagcgaaagcattaagtggctcgctccctgtagccggagggttattttccaagggttgagtcgcgggacccccggttcgagtctcgggccggccggactgcggcgaacgggggtttgcctccccgtcatgcaagaccccgcttgcaaattcctccggaaacagggacgagccccttttttgcttttcccagatgcatccggtgctgcggcagatgcgcccccctcctcagcagcggcaagagcaagagcagcggcagacatgcagggcaccctcccctcctcctaccgcgtcaggaggggcgacatccgcggttgacgcggcagcagatggtgattacgaacccccgcggcgccgggcccggcactacctggacttggaggagggcgagggcctggcgcggctaggagcgccctctcctgagcggtacccaagggtgcagctgaagcgtgatacgcgtgaggcgtacgtgccgcggcagaacctgtttcgcgaccgcgagggagaggagcccgaggagatgcgggatcgaaagttccacgcagggcgcgagctgcggcatggcctgaatcgcgagcggttgctgcgcgaggaggactttgagcccgacgcgcgaaccgggattagtcccgcgcgcgcacacgtggcggccgccgacctggtaaccgcatacgagcagacggtgaaccaggagattaactttcaaaaaagctttaacaaccacgtgcgtacgcttgtggcgcgcgaggaggtggctataggactgatgcatctgtgggactttgtaagcgcgctggagcaaaacccaaatagcaagccgctcatggcgcagctgttccttatagtgcagcacagcagggacaacgaggcattcagggatgcgctgctaaacatagtagagcccgagggccgctggctgctcgatttgataaacatcctgcagagcatagtggtgcaggagcgcagcttgagcctggctgacaaggtggccgccatcaactattccatgcttagcctgggcaagttttacgcccgcaagatataccataccccttacgttcccatagacaaggaggtaaagatcgaggggttctacatgcgcatggcgctgaaggtgcttaccttgagcgacgacctgggcgtttatcgcaacgagcgcatccacaaggccgtgagcgtgagccggcggcgcgagctcagcgaccgcgagctgatgcacagcctgcaaagggccctggctggcacgggcagcggcgatagagaggccgagtcctactttgacgcgggcgctgacctgcgctgggccccaagccgacgcgccctggaggcagctggggccggacctgggctggcggtggcacccgcgcgcgctggcaacgtcggcggcgtggaggaatatgacgaggacgatgagtacgagccagaggacggcgagtactaagcggtgatgtttctgatcagtcgcggccgcgatatcgctagcgaagttcctattctctagaaagtataggaacttcggatcctctagagtcgaaaaaaaaaaagcatgatgcaaaataaaaaactcaccaaggccatggcaccgagcgttggttttcttgtattccccttagtatgcggcgcgcggcgatgtatgaggaaggtcctcctccctcctacgagagtgtggtgagcgcggcgccagtggcggcggcgctgggttctcccttcgatgctcccctggacccgccgtttgtgcctccgcggtacctgcggcctaccggggggagaaacagcatccgttactctgagttggcacccctattcgacaccacccgtgtgtacctggtggacaacaagtcaacggatgtggcatccctgaactaccagaacgaccacagcaactttctgaccacggtcattcaaaacaatgactacagcccgggggaggcaagcacacagaccatcaatcttgacgaccggtcgcactggggcggcgacctgaaaaccatcctgcataccaacatgccaaatgtgaacgagttcatgtttaccaataagtttaaggcgcgggtgatggtgtcgcgcttgcctactaaggacaatcaggtggagctgaaatacgagtgggtggagttcacgctgcccgagggcaactactccgagaccatgaccatagaccttatgaacaacgcgatcgtggagcactacttgaaagtgggcagacagaacggggttctggaaagcgacatcggggtaaagtttgacacccgcaacttcagactggggtttgaccccgtcactggtcttgtcatgcctggggtatatacaaacgaagccttccatccagacatcattttgctgccaggatgcggggtggacttcacccacagccgcctgagcaacttgttgggcatccgcaagcggcaacccttccaggagggctttaggatcacctacgatgatctggagggtggtaacattcccgcactgttggatgtggacgcctaccaggcgagcttgaaagatgacaccgaacagggcgggggtggcgcaggcggcagcaacagcagtggcagcggcgcggaagagaactccaacgcggcagccgcggcaatgcagccggtggaggacatgaacgatcatgccattcgcggcgacacctttgccacacgggctgaggagaagcgcgctgaggccgaagcagcggccgaagctgccgcccccgctgcgcaacccgaggtcgagaagcctcagaagaaaccggtgatcaaacccctgacagaggacagcaagaaacgcagttacaacctaataagcaatgacagcaccttcacccagtaccgcagctggtaccttgcatacaactacggcgaccctcagaccggaatccgctcatggaccctgctttgcactcctgacgtaacctgcggctcggagcaggtctactggtcgttgccagacatgatgcaagaccccgtgaccttccgctccacgcgccagatcagcaactttccggtggtgggcgccgagctgttgcccgtgcactccaagagcttctacaacgaccaggccgtctactcccaactcatccgccagtttacctctctgacccacgtgttcaatcgctttcccgagaaccagattttggcgcgcccgccagcccccaccatcaccaccgtcagtgaaaacgttcctgctctcacagatcacgggacgctaccgctgcgcaacagcatcggaggagtccagcgagtgaccattactgacgccagacgccgcacctgcccctacgtttacaaggccctgggcatagtctcgccgcgcgtcctatcgagccgcactttttgagcaagcatgtccatccttatatcgcccagcaataacacaggctggggcctgcgcttcccaagcaagatgtttggcggggccaagaagcgctccgaccaacacccagtgcgcgtgcgcgggcactaccgcgcgccctggggcgcgcacaaacgcggccgcactgggcgcaccaccgtcgatgacgccatcgacgcggtggtggaggaggcgcgcaactacacgcccacgccgccgccagtgtccaccgtggacgcggccattcagaccgtggtgcgcggagcccggcgctacgctaaaatgaagagacggcggaggcgcgtagcacgtcgccaccgccgccgacccggcactgccgcccaacgcgcggcggcggccctgcttaaccgcgcacgtcgcaccggccgacgggcggccatgcgagccgctcgaaggctggccgcgggtattgtcactgtgccccccaggtccaggcgacgagcggccgccgcagcagccgcggccattagtgttatgactcagggtcgcaggggcaacgtgtactgggtgcgcgactcggttagcggcctgcgcgtgcccgtgcgcacccgccccccgcgcaactagattgcaataaaaaactacttagactcgtactgttgtatgtatccagcggcggcggcgcgcatcgaagctatgtccaagcgcaaaatcaaagaagagatgctccaggtcatcgcgccggagatctatggccccccgaagaaggaagagcaggattacaagccccgaaagctaaagcgggtcaaaaagaaaaagaaagatgatgatgatgatgaacttgacgacgaggtggaactgttgcacgcgaccgcgcccaggcgacgggtacagtggaaaggtcgacgcgtaagacgtgttttgcgacccggcaccaccgtagtctttacgcccggtgagcgctccacccgcacctacaagcgcgtgtatgatgaggtgtacggcgacgaggacctgcttgagcaggccaacgagcgcctcggggagtttgcctacggaaagcggcataaggacatgctggcgttgccgctggacgagggcaacccaacacctagcctaaagcccgtgacactgcagcaggtgctgcccgcgcttgcaccgtccgaagaaaagcgcggcctaaagcgcgagtctggtgacttggcacccaccgtgcagctgatggtacccaagcgtcagcgactggaagatgtcttggaaaaaatgaccgtggagcctgggctggagcccgaggtccgcgtgcggccaatcaagcaggtggcaccgggactgggcgtgcagaccgtggacgttcagatacccaccaccagtagcactagtattgccactgccacagagggcatggagacacaaacgtccccggttgcctcggcggtggcagatgccgcggtgcaggcggccgctgcggccgcgtccaagacctctacggaggtgcaaacggacccgtggatgtttcgtgtttcagccccccggcgtccgcgccgttcaaggaagtacggcgccgccagcgcgctactgcccgaatatgccctacatccttccatcgcgcctacccccggctatcgtggctacacctaccgccccagaagacgagcaactacccgacgccgaaccaccactggaacccgccgccgccgtcgccgtcgccagcccgtgctggccccgatttccgtgcgcagggtggctcgcgaaggaggcaggaccctggtgctgccaacagcgcgctaccaccccagcatcgtttaaaagccggtctttgtggttcttgcagatatggccctcacctgccgcctccgtttcccggtgccgggattccgaggaagaatgcaccgtaggaggggcatggccggccacggcctgacgggcggcatgcgtcgtgcgcaccaccggcggcggcgcgcgtcgcaccgtcgcatgcgcgccggtatcctgcccctccttattccactgatcgccgcggcgattggcgccgtgcccggaattgcatccgtggccttgcaggcgcagagacactgattaaaaacaagttacatgtggaaaaatcaaaataaaagtctggactctcacgctcgcttggtcctgtaactattttgtagaatggaagacatcaactttgcgtcactggccccgcgacacggctcgcgcccgttcatgggaaactggcaagatatcggcaccagcaatatgagcggtggcgccttcagctggggctcgctgtggagcggcattaaaaatttcggttccgccgttaagaactatggcagcaaagcctggaacagcagcacaggccagatgctgagggacaagttgaaagagcaaaatttccaacaaaaggtggtagatggcctggcctctggcattagcggggtggtggacctggccaaccaggcagtgcaaaataagattaacagtaagcttgatccccgccctcccgtagaggagcctccaccggccgtggagacagtgtctccagaggggcgtggcgaaaagcgtccgcgacccgacagggaagaaactctggtgacgcaaatagacgagcctccctcgtacgaggaggcactaaagcaaggcctgcccaccacccgtcccatcgcgcccatggctaccggagtgctgggccagcacacacccgtaacgctggacctgcctccccccgccgacacccagcagaaacctgtgctgccaggcccgtccgccgttgttgtaacccgtcctagccgcgggtccctgcgccgcgccgccagcggtccgcgatcgttgcggcccgtagccagtggcaactggcaaagcacactgaacagcatcgtgggtctgggggtgcaatccctgaagcgccgacgatgcttctgatcgcggccgcgatatcgctagcgaagttcctattctctagaaagtataggaacttctcgagcacgtgttgacaattaatcatcggcatagtatatcggcatagtataatacgacaaggtgaggaactaaaccatggccaagttgaccagtgccgttccggtgctcaccgcgcgcgacgtcgccggagcggtcgagttctggaccgaccggctcgggttctcccgggacttcgtggaggacgacttcgccggtgtggtccgggacgacgtgaccctgttcatcagcgcggtccaggaccaggtggtgccggacaacaccctggcctgggtgtgggtgcgcggcctggacgagctgtacgccgagtggtcggaggtcgtgtccacgaacttccgggacgcctccgggccggccatgaccgagatcggcgagcagccgtgggggcgggagttcgccctgcgcgacccggccggcaactgcgtgcacttcgtggccgaggagcaggactgagaattcgaagttcctattctctagaaagtataggaacttctcgagcacgggatcctctagagtcgatagctaacgtgtcgtatgtgtgtcatgtatgcgtccatgtcgccgccagaggagctgctgagccgccgcgcgcccgctttccaagatggctaccccttcgatgatgccgcagtggtcttacatgcacatctcgggccaggacgcctcggagtacctgagccccgggctggtgcagtttgcccgcgccaccgagacgtacttcagcctgaataacaagtttagaaaccccacggtggcgcctacgcacgacgtgaccacagaccggtcccagcgtttgacgctgcggttcatccctgtggaccgtgaggatactgcgtactcgtacaaggcgcggttcaccctagctgtgggtgataaccgtgtgctggacatggcttccacgtactttgacatccgcggcgtgctggacaggggccctacttttaagccctactctggcactgcctacaacgccctggctcccaagggtgccccaaatccttgcgaatggacatataaagccgatggtgaaactgccacagaaaaaacccacgtatttgggcaggcgccttattctggtataaatattacaaaagatggtattcaacttggaactgacaccgatgatcagccaatctacgcagataaaacatttcaacctgaacctcaaataggagaatctcagtggtacgaaactgaaattaatcatgcagctgggagagtccttaaaaagactaccccaatgaaaccatgttacggttcatatgcaaaacccacaaatgaaaatggagggcaagcaaatgtgaaaacaggaacaggcactactaaagaatatgacatagacatgcaatttttcgacaacagaagtgcggctgctgctggcctagctccagaagtggtattgtacagtgaagatgtagatatagaaaccccagacactcatatttcttacatgcccactattaaggaaggtaactcacgagaactaatgggccaacaatctatgcccaacaggcctaattacattgcttttagggacaattttattggtctaatgtattacaacagcacgggtaatatgggtgttctggcgggccaagcatcgcagttgaatgctgttgtagatttgcaagacagaaacacagagctttcataccagcttttgcttgattccattggtgatagaaccaggtacttttctatgtggaatcaggctgttgacagctatgatccagatgttagaattattgaaaatcatggaactgaagatgaacttccaaattactgctttccactgggaggtgtgattagaacagatacttatcagggaattaaggctaatggaactgatcaaaccacatggaccaaagatgacagtgtcaatgatgctaatgaggaaataagagttggaaataattttgccatggaaatcaatctaaatgccaacctgtggagaaatttcctgtactccaacatagcgctgtatttgcccgacaagctaaagtacagtccttccaacgtaaaaatttctgataacccaaacacctacgactacatgaacaagcgagtggtggctcccgggttagtggactgctacattaaccttggagcacgctggtcccttgactatatggacaacgtcaacccatttaaccaccaccgcaatgctggcctgcgctaccgctcaatgttgctgggcaatggtcgctatgtgcccttccacatccaggtgcctcagaagttctttgccattaaaaacctccttctcctgccgggctcatacacctacgagtggaacttcaggaaggatgttaacatggttctgcagagctctctgggaaacgaccttagagttgacggggctagcattaagtttgacagcatttgtctttacgccaccttcttccccatggcccacaacacggcctccacgctggaagccatgctcagaaatgacaccaacgaccagtcctttaatgactacctttccgccgccaacatgctatatcccatacccgccaacgccaccaacgtgcccatctccatcccatcgcgcaactgggcagcatttcgcggttgggccttcacacgcttgaagacaaaggaaaccccttccctgggatcaggctacgacccttactacacctactctggctccataccataccttgacggaaccttctatcttaatcacacctttaagaaggtggccattacttttgactcttctgttagctggccgggcaacgaccgcctgcttactcccaatgagtttgagattaagcgctcagttgacggggagggctataacgtagctcagtgcaacatgacaaaggactggttcctagtgcagatgttggccaactacaatattggctaccagggcttctacattccagaaagctacaaagaccgcatgtactcgttcttcagaaacttccagcccatgagccggcaagtggtggacgatactaaatacaaagattatcagcaggttggaattatccaccagcataacaactcaggcttcgtaggctacctcgctcccaccatgcgcgagggacaagcttaccccgctaatgttccctacccactaataggcaaaaccgcggttgatagtattacccagaaaaagtttctttgcgaccgcaccctgtggcgcatccccttctccagtaactttatgtccatgggtgcgctcacagacctgggccaaaaccttctctacgcaaactccgcccacgcgctagacatgacctttgaggtggatcccatggacgagcccacccttctttatgttttgtttgaagtctttgacgtggtccgtgtgcaccagccgcaccgcggcgtcatcgagaccgtgtacctgcgcacgcccttctcggccggcaacgccacaacataaagaagcaagcaacatcaacaacagctgccgccatgggctccagtgagcaggaactgaaagccattgtcaaagatcttggttgtgggccatattttttgggcacctatgacaagcgcttcccaggctttgtttccccacacaagctcgcctgcgccatagttaacacggccggtcgcgagactgggggcgtacactggatggcctttgcctggaacccgcgctcaaaaacatgctacctctttgagccctttggcttttctgaccaacgtctcaagcaggtttaccagtttgagtacgagtcactcctgcgccgtagcgccattgcctcttcccccgaccgctgtataacgctggaaaagtccacccaaagcgtgcaggggcccaactcggccgcctgtggcctattctgctgcatgtttctccacgcctttgccaactggccccaaactcccatggatcacaaccccaccatgaaccttattaccggggtacccaactccatgcttaacagtccccaggtacagcccaccctgcgccgcaaccaggaacagctctacagcttcctggagcgccactcgccctacttccgcagccacagtgcgcaaattaggagcgccacttctttttgtcacttgaaaaacatgtaaaaataatgtactaggagacactttcaataaaggcaaatgtttttatttgtacactctcgggtgattatttacccccacccttgccgtctgcgccgtttaaaaatcaaaggggttctgccgcgcatcgctatgcgccactggcagggacacgttgcgatactggtgtttagtgctccacttaaactcaggcacaaccatccgcggcagctcggtgaagttttcactccacaggctgcgcaccatcaccaacgcgtttagcaggtcgggcgccgatatcttgaagtcgcagttggggcctccgccctgcgcgcgcgagttgcgatacacagggttacagcactggaacactatcagcgccgggtggtgcacgctggccagcacgctcttgtcggagatcanatccgcgtccaggtcctccgcgttgctcagggcgaacggagtcaactttggtagctgccttcccaaaaagggtgcatgcccaggctttgagttgcactcgcaccgtagtggcatcagaaggtgaccgtgcccagtctgggcgttaggatacagcgcctgcatgaaagccttgatctgcttaaaagccacctgagcctttgcgccttcagagaagaacatgccgcaagacttgccggaaaactgattggccggacaggccgcgtcatgcacgcagcaccttgcgtcggtgttggagatctgcaccacatttcggccccaccggttcttcacgatcttggccttgctagactgctccttcagcgcgcgctgcccgttttcgctcgtcacatccatttcaatcacgtgctccttatttatcataatgctcccgtgtagacacttaagctcgccttcgatctcagcgcagcggtgcagccacaacgcgcagcccgtgggctcgtggtgcttgtaggttacctctgcaaacgactgcaggtacgcctgcaggaatcgccccatcatcgtcacaaaggtcttgttgctggtgaaggtcagctgcaacccgcggtgctcctcgtttagccaggtcttgcatacggccgccagagcttccacttggtcaggcagtagcttgaagtttgcctttagatcgttatccacgtggtacttgtccatcaacgcgcgcgcagcctccatgcccttctcccacgcagacacgatcggcaggctcagcgggtttatcaccgtgctttcactttccgcttcactggactcttccttttcctcttgcatccgcataccccgcgccactgggtcgtcttcattcagccgccgcaccgtgcgcttacctcccttgccgtgcttgattagcaccggtgggttgctgaaacccaccatttgtagcgccacatcttctctttcttcctcgctgtccacgatcacctctggggatggcgggcgctcgggcttgggagaggggcgcttctttttctttttggacgcaatggccaaatccgccgtcgaggtcgatggccgcgggctgggtgtgcgcggcaccagcgcatcttgtgacgagtcttcttcgtcctcggactcgagacgccgcctcagccgcttttttgggggcgcgcggggaggcggcggcgacggcgacggggacgagacgtcctccatggttggtggacgtcgcgccgcaccgcgtccgcgctcgggggtggtttcgcgctgctcctcttcccgactggccatttccttctcctataggcagaaaaagatcatggagtcagtcgagaaggaggacagcctaaccgccccctttgagttcgccaccaccgcctccaccgatgccgccaacgcgcctaccaccttccccgtcgaggcacccccgcttgaggaggaggaagtgattatcgagcaggacccaggttttgtaagcgaagacgacgaagatcgctcagtaccaacagaggataaaaagcaagaccaggacgacgcagaggcaaacgaggaacaagtcgggcggggggaccaaaggcatggcgactacctagatgtgggagacgacgtgctgttgaagcatctgcagcgccagtgcgccattatctgcgacgcgttgcaagagcgcagcgatgtgcccctcgccatagcggatgtcagccttgcctacgaacgccacctgttctcaccgcgcgtaccccccaaacgccaagaaaacggcacatgcgagcccaacccgcgcctcaacttctaccccgtatttgccgtgccagaggtgcttgccacctatcacatctttttccaaaactgcaagatacccctatcctgccgtgccaaccgcagccgagcggacaagcagctggccttgcggcagggcgctgtcatacctgatatcgcctcgctcgacgaagtgccaaaaatctttgagggtcttggacgcgacgagaagcgcgcggcaaacgctctgcaacaagaaaacagcgaaaatgaaagtcactgtggagtgctggtggaacttgagggtgacaacgcgcgcctagccgtgctgaaacgcagcatcgaggtcacccactttgcctacccggcacttaacctaccccccaaggttatgagcacagtcatgagcgagctgatcgtgcgccgtgcacgacccctggagagggatgcaaacttgcaagaacaaaccgaggagggcctacccgcagttggcgatgagcagctggcgcgctggcttgagacgcgcgagcctgccgacttggaggagcgacgcaagctaatgatggccgcagtgcttgttaccgtggagcttgagtgcatgcagcggttctttgctgacccggagatgcagcgcaagctagaggaaacgttgcactacacctttcgccagggctacgtgcgccaggcctgcaaaatttccaacgtggagctctgcaacctggtctcctaccttggaattttgcacgaaaaccgccttgggcaaaacgtgcttcattccacgctcaagggcgaggcgcgccgcgactacgtccgcgactgcgtttacttatttctgtgctacacctggcaaacggccatgggcgtgtggcagcagtgcctggaggagcgcaacctgaaggagctgcagaagctgctaaagcaaaacttgaaggacctatggacggccttcaacgagcgctccgtggccgcgcacctggcggacattatcttccccgaacgcctgcttaaaaccctgcaacagggtctgccagacttcaccagtcaaagcatgttgcaaaactttaggaactttatcctagagcgttcaggaattctgcccgccacctgctgtgcgcttcctagcgactttgtgcccattaagtaccgtgaatgccctccgccgctttggggtcactgctaccttntgcagctagccaactaccttgcctaccactccgacatcatggaagacgtgagcggtgacggcctactggagtgtcactgtcgctgcaacctatgcaccccgcaccgctccctggtctgcaattcacaactgcttagcgaaagtcaaattatcggtacctttgagctgcagggtccctcgcctgacgaaaagtccgcggctccggggttgaaactcactccggggctgtggacgtcggcttaccttcgcaaatttgtacctgaggactaccacgcccacgagattaggttctacgaagaccaatcccgcccgccaaatgcggagcttaccgcctgcgtcattacccagggccacatccttggccaattgcaagccattaacaaagcccgccaagagtttctgctacgaaagggacggggggtttacttggacccccagtccggcgaggagctcaacccaatccccccgccgccgcagccctatcagcagccgcgggcccttgcttcccaggatggcacccaaaaagaagctgcagctgccgccgccgccacccacggacgaggaggaatactgggacagtcaggcagaggaggttttggacgaggaggaggagatgatggaagactgggacagcctagacgaggaagcttccgaggccgaagaggtgtcagacgaaacaccgtcaccctcggtcgcattcccctcgccggcgccccagaaatcggcaaccgttcccagcattgctacaacctccgctcctcaggcgccgccggcactgcccgttcgccgacccaaccgtagatgggacaccactggaaccagggccggtaagtctaagcagccgccgccgttagcccaagagcaacaacagcgccaaggctaccgctcgtggcgcgtgcacaagaacgccatagttgcttgcttgcaagactgtgggggcaacatctccttcgcccgccgctttcttctctaccatcacggcgtggccttcccccgtaacatcctgcattactaccgtcatctctacagcccctactgcaccggcggcagcggcagcaacagcagcggccacgcagaagcaaaggcgaccggatagcaagactctgacaaagcccaagaaatccacagcggcggcagcagcaggaggaggagcactgcgtctggcgcccaacgaacccgtatcgacccgcgagcttagaaacaggatttttcccactctgtatgctatatttcaacagagcaggggccaagaacaagagctgaaaataaaaaacaggtctctgcgctccctcacccgcagctgcctgtatcacaaaagcgaagatcagcttcggcgcacgctggaagacgcggaggctctcttcagcaaatactgcgcgctgactcttaaggactagtttcgcgccctttctcaaatttaagcgcgaaaactacgtcatctccagcggccacacccggcgccagcacctgtcgtcagcgccattatgagcaaggaaattcccacgccctacatgtggagttaccagccacaaatgggacttgcggctggagctgcccaagactactcaacccgaataaactacatgagcgcgggaccccacatgatatcccgggtcaacggaatccgcgcccaccgaaaccgaattctcctcgaacaggcggctattaccaccacacctcgtaataaccttaatccccgtagttggcccgctgccctggtgtaccaggaaagtcccgctcccaccactgtggtacttcccagagacgcccaggccgaagttcagatgactaactcaggggcgcagcttgcgggcggctttcgtcacagggtgcggtcgcccgggcagggtataactcacctgaaaatcagagggcgaggtattcagctcaacgacgagtcggtgagctcctctcttggtctccgtccggacgggacatttcagatcggcggcgctggccgctcttcatttacgccccgtcaggcgatcctaactctgcagacctcgtcctcggagccgcgctccggaggcattggaactctacaatttattgaggagttcgtgccttcggtttacttcaaccccttttctggacctcccggccactacccggaccagtttattcccaactttgacgcggtaaaagactcggcggacggctacgactgacagatctgagctcgcggccgcgatatcgctagcgaagttcctattctctagaaagtataggaacttcgatcctctagagtcgacctgcaggcatgcaagcttggcactgcaataaattacttacttaaaatcagtcagcaaatctttgtccagcttattcagcatcacctcctttccctcctcccaactctggtatttcagcagccttttagctgcgaactttctccaaagtctaaatgggatgtcaaattcctcatgttcttgtccctccgcacccactatcttcatattgttgcagatgaaacgcgccagaccgtctgaagacaccttcaaccctgtgtacccatatgacacggaaaccggccctccaactgtgcctttccttacccctccctttgtgtcgccaaatgggttccaagaaagtccccccggagtgctttctttgcgtctttcagaacctttggttacctcacacggcatgcttgcgctaaaaatgggcagcggcctgtccctggatcaggcaggcaaccttacatcaaatacaatcactgtttctcaaccgctaaaaaaaacaaagtccaatataactttggaaacatccgcgccccttacagtcagctcaggcgccctaaccatggccacaacttcgcctttggtggtctctgacaacactcttaccatgcaatcacaagcaccgctaaccgtgcaagactcaaaacttagcattgctaccaaagagccacttacagtgttagatggaaaactggccctgcagacatcagcccccctctctgccactgataacaacgccctcactatcactgcctcacctcctcttactactgcaaatggtagtctggctgttaccatggaaaacccactttacaacaacaatggaaaacttgggctcaaaattggcggtcctttgcaagtggccaccgactcacatgcactaacactaggtactggtcagggggttgcagttcataacaatttgctacatacaaaagttacaggcgcaatagggtttgatacatctggcaacatggaacttaaaactggagatggcctctatgtggatagcgccggtcctaaccaaaaactacatattaatctaaataccacaaaaggccttgcttttgacaacaccgcaataacaattaacgctggaaaagggttggaatttgaaacagactcctcaaacggaaatcccataaaaacaaaaattggatcaggcatacaatataataccaatggagctatggttgcaaaacttggaacaggcctcagttttgacagctccggagccataacaatgggcagcataaacaatgacagacttactctttggacaacaccagacccatccccaaattgcagaattgcttcagataaagactgcaagctaactctggcgctaacaaaatgtggcagtcaaattttgggcactgtttcagctttggcagtatcaggtaatatggcctccatcaatggaactctaagcagtgtaaacttggttcttagatttgatgacaacggagtgcttatgtcaaattcatcactggacaaacagtattggaactttagaaacggggactccactaacggtcaaccatacacttatgctgttgggtttatgccaaacctaaaagcttacccaaaaactcaaagtaaaactgcaaaaagtaatattgttagccaggtgtatcttaatggtgacaagtctaaaccattgcattttactattacgctaaatggaacagatgaaaccaaccaagtaagcaaatactcaatatcattcagttggtcctggaacagtggacaatacactaatgacaaatttgccaccaattcctataccttctcctacattgcccaggaataaagaatcgtgaacctgttgcatgttatgtttcaacgtgtttatttttcaattcgtattagtcatcgctattaccatggtgatgcggttttggcagtacatcaatgggcgtggatagcggtttgactcacggggatttccaagtctccaccccattgacgtcaatgggagtttgttttggcaccaaaatcaacgggactttccaaaatgtcgtaacaactccgccccattgacgcaaatgggcggtaggcgtgtacggtgggaggtctatataagcagagctggtttagtgaaccgtcagatccgctagagatccaccatgtttgtctttctcgtgctgctgcccctcgtgagcagccagtgcgtcaatctgacaacaaggacccagctgccccccgcctacaccaactccttcacaagaggcgtgtattaccccgataaggtcttcagatccagcgtcctccacagcacccaagatttgtttctgcctttcttcagcaacgtgacatggttccacgccattcatgtcagcggcacaaacggcacaaagaggtttgacaaccccgtgctccccttcaacgacggcgtgtacttcgccagcacagagaaatccaatatcattaggggctggatcttcggcacaacactggattccaagacccagtctctgctcattgtgaataacgccaccaacgtggtgattaaggtctgtgagtttcagttctgcaacgacccctttctgggagtctactaccacaagaataataagagctggatggagtccgagtttagggtgtacagctccgccaacaactgtaccttcgaatacgtgtcccagcctttcctcatggatctggagggcaagcaaggcaatttcaaaaatctgagagagttcgtgttcaaaaacattgatggatacttcaaaatctacagcaagcatacccccattaatctggtgagggatctgccccaaggattctccgctctggaacctctggtggatctgcccattggcattaacatcacaagattccagaccctcctcgccctccatagatcctatctgacccccggcgactcctccagcggatggacagccggagctgccgcctactacgtgggctatctgcagccaagaacctttctgctgaagtacaacgagaacggcaccatcacagacgctgtcgattgcgctctcgaccctctgagcgagaccaaatgcacactgaagagcttcaccgtggaaaagggcatctatcagaccagcaacttcagagtgcagcctaccgagagcattgtgaggtttcccaacatcaccaatctgtgtcctttcggcgaggtctttaatgccacaaggttcgcttccgtgtatgcttggaataggaagaggatcagcaattgcgtcgccgactattccgtcctctataacagcgcctccttctccaccttcaaatgttatggcgtgtcccccaccaagctcaacgacctctgcttcaccaatgtgtacgctgactccttcgtcattaggggcgacgaggtgaggcaaattgcccccggccagaccggcaagattgctgattacaactacaaactgcccgacgattttaccggctgcgtgatcgcttggaactccaacaatctggactccaaagtgggcggaaactacaattacctctacagactctttagaaaaagcaatctgaagcccttcgagagagacatctccaccgaaatctaccaagccggaagcacaccttgcaatggcgtcgagggatttaactgctacttccctctgcagagctacggctttcaacctaccaacggcgtcggatatcaaccctatagggtggtcgtgctgagctttgaactgctgcatgctcccgccaccgtctgcggacctaagaagagcaccaatctcgtcaaaaacaagtgcgtgaacttcaacttcaatggactgaccggcaccggcgtgctgaccgagagcaataagaagtttctgcccttccagcagttcggaagggatattgccgataccacagatgctgtgagggacccccaaaccctcgagattctggatatcaccccttgcagcttcggaggagtgtccgtgatcacccccggaacaaacacctccaatcaagtggctgtgctgtaccaagacgtgaactgcacagaagtccccgtggccatccatgccgaccagctgacccctacatggagagtgtactccaccggcagcaatgtgttccagacaagagccggatgcctcattggagctgaacacgtcaacaacagctacgagtgcgacattcccatcggcgccggcatttgtgcctcctatcagacccagaccaacagcccaagaagggctagaagcgtcgcttcccaatccatcattgcctacaccatgtctctgggagccgaaaactccgtcgcctactccaacaatagcatcgccatccccaccaattttaccatctccgtgaccacagagattctgcccgtgtccatgacaaagacatccgtggactgcaccatgtacatctgtggcgacagcaccgagtgtagcaatctgctgctgcaatatggcagcttctgcacccagctgaacagagccctcaccggcatcgccgtcgaacaagacaagaacacccaagaggtgttcgcccaagtgaagcaaatctacaagaccccccctatcaaagatttcggaggattcaactttagccagattctgcccgatcctagcaagccttccaagaggagcttcatcgaggatctgctgtttaataaggtgacactggccgacgctggcttcattaaacagtacggcgattgtctgggcgacatcgctgctagggatctgatctgcgctcagaagttcaacggactgacagtcctccctcctctgctgaccgacgagatgatcgctcagtataccagcgctctgctggctggaaccattaccagcggctggacattcggcgctggagccgccctccaaattccctttgccatgcagatggcctatagattcaacggcattggcgtcacccaaaatgtgctgtatgaaaatcagaagctgattgctaaccaattcaatagcgccattggcaagatccaagactctctgagctccacagccagcgccctcggaaagctgcaagacgtggtgaatcaaaacgcccaagctctgaacacactggtgaaacagctcagcagcaactttggagccatcagcagcgtgctcaatgatatcctctctaggctggaccctccggaggccgaagtccagatcgatagactcatcaccggcagactccaatctctgcagacatacgtcacccaacagctcattagagctgccgaaatcagagcctccgccaatctggccgccaccaagatgtccgagtgcgtgctgggacagagcaagagagtggacttctgtggcaagggataccatctgatgagcttcccccagagcgctccccatggagtggtctttctgcatgtcacatacgtgcccgcccaagagaagaacttcaccaccgctcccgccatttgccacgatggaaaggcccactttcccagagaaggagtgttcgtgagcaacggcacacactggtttgtcacccagagaaatttttacgagccccagattatcaccaccgacaacaccttcgtgtccggaaactgcgatgtcgtgattggcatcgtgaacaacacagtctacgaccctctgcagcccgaactcgacagcttcaaggaagagctggacaagtacttcaagaatcacacatcccccgacgtggatctgggcgacattagcggcattaatgcctccgtcgtcaacattcagaaggagattgatagactgaatgaagtcgccaagaacctcaatgagtctctgattgatctgcaagagctgggcaagtacgagcaatacatcaaatggccttggtacatctggctgggattcatcgctggactcatcgccatcgtgatggtcaccattatgctgtgttgcatgaccagctgctgcagctgtctgaagggctgctgcagctgcggaagctgctgcaagtttgacgaagacgactccgagcccgtgctgaagggcgtcaagctgcattatacataaactagtgctggaattcgcccttatagagtgctggaattcgcccttatagagtgctggaattcgcccttatatctagtaacggccgccagtgtgctggaattcgcccttataacttcgtatagcatacattatacgaagttataagggcgaattctgcagatatccatcctttaaaaaacctcccacacctccccctgaacctgaaacataaaatgaatgcaattgttgttgttaacttgtttattgcagcttataatggttacaaataaagcaatagcatcacaaatttcacaaataaagcatttttttcactgcattctagttgtggtttgtccaaactcatcaatgtatcttaacaacgtgtttatttttcaattgcagaaagaattgcagaaaatttcaagtcatttttcattcagtagtatagccccaccaccacatagcttatactaatcaccgtaccttaatcaaactcacagaaccctagtattcaacctgccacctccctcccaacacacagagtacacagtcctttctccccggctggccttaaacagcatcatatcatgggtaacagacatattcttaggtgttatattccacacggtctcctgtcgagccaaacgctcatcagtgatgttaataaactccccgggcagctcgcttaagttcatgtcgctgtccagctgctgagccacaggctgctgtccaacttgcggttgctcaacgggcggcgaaggagaagtccacgcctacatgggggtagagtcataatcgtgcatcaggatagggcggtggtgctgcagcagcgcgcgaataaactgctgccgccgccgctccgtcctgcaggaatacaacatggcagtggtctcctcagcgatgattcgcaccgcccgcagcataaggcgccttgtcctccgggcacagcagcgcaccctgatctcacttaagtcagcacagtaactgcagcacagtaccacaatattgtttaaaatcccacagtgcaaggcgctgtatccaaagctcatggcggggaccacagaacccacgtggccatcataccacaagcgcaggtagattaagtggcgacccctcataaacacgctggacataaacattacctcttttggcatgttgtaattcaccacctcccggtaccatataaacctctgattaaacatggcgccatccaccaccatcctaaaccagctggccaaaacctgcccgccggctatgcactgcagggaaccgggactggaacaatgacagtggagagcccaggactcgtaaccatggatcatcatgctcgtcatgatatcaatgttggcacaacacaggcacacgtgcatacacttcctcaggattacaagctcctcccgcgtcagaaccatatcccagggaacaacccattcctgaatcagcgtaaatcccacactgcagggaagacctcgcacgtaactcacgttgtgcattgtcaaagtgttacattcgggcagcagcggatgatcctccagtatggtagcgcgtgtctctgtctcaaaaggaggtaggcgatccctactgtacggagtgcgccgagacaaccgagatcgtgttggtcgtagtgtcatgccaaatggaacgccggacgtagtcatatttcctgaagcaaaaccaggtgcgggcgtgacaaacagatctgcgtctccggtctcgtcgcttagctcgctctgtgtagtagttgtagtatatccactctctcaaagcatccaggcgccccctggcttcgggttctatgtaaactccttcatgcgccgctgccctgataacatccaccaccgcagaataagccacacccagccaacctacacattcgttctgcgagtcacacacgggaggagcgggaagagctggaagaaccatgttttttttttttattccaaaagattatccaaaacctcaaaatgaagatctattaagtgaacgcgctcccctccggtggcgtggtcaaactctacagccaaagaacagataatggcatttgtaagatgttgcacaatggcttccaaaaggcaaactgccctcacgtccaagtggacgtaaaggctaaacccttcanggtgaatctcctctataaacattccagcaccttcaaccatgcccaaataattttcatctcgccaccttatcaatatgtctctaagcaaatcccgaatattaagtccggccattgtaaaaatctgctccagagcgccctccaccttcagcctcaagcagcgaatcatgattgcaaaaattcaggttcctcacagacctgtataagattcaaaagcggaacattaacaaaaataccgcgatcccgtaggtcccttcgcagggccagctgaacataatcgtgcaggtctgcacggaccagcgcggccacttccccgccaggaaccatgacaaaagaacccacactgattatgacacgcatactcggagctatgctaaccagcgtagccccgatgtaagcttgttgcatgggcggcgatataaaatgcaaggtactgctcaaaaaatcaggcaaagcctcgcgcaaaaaagcaagcacatcgtagtcatgctcatgcagataaaggcaggtaagttccggaaccaccacagaaaaagacaccatttttctctcaaacatgtctgcgggttcctgcataaacacaaaataaaataacaaaaaaaaaaaaacatttaaacattagaagcctgtcttacaacaggaaaaacaacccttataagcataagacggactacggccatgccggcgtgaccgtaaaaaaactggtcaccgtgattaaaaagcaccaccgacagttcctcggtcatgtccggagtcataatgtaagactcggtaaacacatcaggttggttaacatcggtcagtgctaaaaagcgaccgaaatagcccgggggaatacatacccgcaggcgtagagacaacattacagcccccataggaggtataacaaaattaataggagagaaaaacacataaacccctgaaaaaccctcctgcccctaggcaaaatagcaccctcccgctccagaacaacatacagcgcttccacagcggcagccataacagtcagccttaccagtaaaaaaacctattaaaaaacaccactcgacacggcaccagctcaatcagtcacagtgtaaaaagggccaagtacagagcgagtatatataggactaaaaaatgacgtaacggttaaagtccacaaaaaccacccagaaaaccgcacgcgaacctacgcccagaaacgaaagccaaaaaacccacaacttcctcaaatcttcacttccgttttcccacgatacgtcacttcccattttaaaaaaaaactacaattcccaatacatgcaagttactccgccctaaaacctacgtcacccgccccgttcccacgccccgcgccacgtcacaaactccaccccctcattatcatattggcttcaatccaaaataaggtatattattgatgatggcgat

SEQ ID NO: 36 - DNA, 35792 bp, Artificial
  nucleic acid sequence of SC-Ad-F-657-(delta)IIIF-(delta)E3-Spike-3X-L
  misc_feature (7190)..(7190): n is a, c, g, or t
  misc_feature (21158)..(21158): n is a, c, g, or t
  misc_feature (24094)..(24094): n is a, c, g, or t
  misc_feature (34382)..(34382): n is a, c, g, or t
cgccatcatcaataatataccttattttggattgaagccaatatgataatgagggggtggagtttgtgacgtggcgcggggcgtgggaacggggcgggtgacgtagtagtgtggcggaagtgtgatgttgtaagtgtggcggaacacatgtaagcgccggatgtggtaaaagtgacgtttttggtgtgcgccggtgtacacgggaagtgacaattttcgcgcggttttaggcggatgttgtagtaaatttgggcgtaaccaagtaatatttggccattttcgcgggaaaactgaataagaggaagtgaaatctgaataattctgtgttactcatagcgcgtaatatttgtctagggccgcggggactttgaccgtttacgtggagactcgcccaggtgtttttctcaggtgttttccgcgttccgggtcaaagttggcgttttattattatagtcagctgacgcgcagtgtatttatacccggtgagttcctcaagaggccactcttgagtgccagcgagtagagttttctcctccgagccgctccgacaccgggactgaaaatgagacatattatctgccacggaggtgttattaccgaagaaatggccgccagtcttttggaccagctgatcgaagaggtactggctgataatcttccacctcctagccattttgaaccacctacccttcacgaactgtatgatttagacgtgacggcccccgaagatcccaacgaggaggcggtttcgcagatttttcccgagtctgtaatgttggcggtgcaggaagggattgacttattcacttttccgccggcgcccggttctccggagccgcctcacctttcccggcagcccgagcagccggagcagagagccttgggtccggtttctatgccaaaccttgtgccggaggtgatcgatcttacctgccacgaggctggctttccacccagtgacgacgaggatgaagagggtgaggagtttgtgttagattatgtggagcaccccgggcacggttgcaggtcttgtcattatcaccggaggaatacgggggacccagatattatgtgttcgctttgctatatgaggacctgtggcatgtttgtctacagtaagtgaaaaattatgggcagtgggtgatagagtggtgggtttggtgtggtaattttttttttaatttttacagttttgtggtttaaagaattttgtattgtgattttttaaaaggtcctgtgtctgaacctgagcctgagcccgagccagaaccggagcctgcaagacctacccggcgtcctaaattggtgcctgctatcctgagacgcccgacatcacctgtgtctagagaatgcaatagtagtacggatagctgtgactccggtccttctaacacacctcctgagatacacccggtggtcccgctgtgccccattaaaccagttgccgtgagagttggtgggcgtcgccaggctgtggaatgtatcgaggacttgcttaacgagtctgggcaacctttggacttgagctgtaaacgccccaggccataaggtgtaaacctgtgattgcgtgtgtggttaacgcctttgtttgctgaatgagttgatgtaagtttaataaagggtgagataatgtttaacttgcatggcgtgttaaatggggcggggcttaaagggtatataatgcgccgtgggctaatcttggttacatctgacctcatggaggcttgggagtgtttggaagatttttctgctgtgcgtaacttgctggaacagagctctaacagtacctcttggttttggaggtttctgtggggctcctcccaggcaaagttagtctgcagaattaaggaggattacaagtgggaatttgaagagcttttgaaatcctgtggtgagctgtttgattctttgaatctgggtcaccaggcgcttttccaagagaaggtcatcaagactttggatttttccacaccggggcgcgctgcggctgctgttgcttttttgagttttataaaggataaatggagcgaagaaacccatctgagcggggggtacctgctggattttctggccatgcatctgtggagagcggtggtgagacacaagaatcgcctgctactgttgtcttccgtccgcccggcaataataccgacggaggagcaacagcaggaggaagccaggcggcggcggcggcaggagcagagcccatggaacccgagagccggcctggaccctcgggaatgaatgttgtacaggtggctgaactgtttccagaactgagacgcattttaaccattaacgaggatgggcaggggctaaagggggtaaagagggagcggggggcttctgaggctacagaggaggctaggaatctaacttttagcttaatgaccagacaccgtcctgagtgtgttacttttcagcagattaaggataattgcgctaatgagcttgatctgctggcgcagaagtattccataaagcagctgaccacttactggctgcagccaggggatgattttgaggaggctattagggtatatgcaaaggtggcacttaggccagattgcaagtacaagattagcaaacttgtaaatatcaggaattgttgctacatttctgggaacggggccgaggtggagatagatacggaggatagggtggcctttagatgtagcatgataaatatgtggccgggggtgcttggcatggacggggtggttattatgaatgtgaggtttactggtcccaattttagcggtacggttttcctggccaataccaatcttatcctacacggtgtaagcttctatgggtttaacaatacctgtgtggaagcctggaccgatgtaagggttcggggctgtgccttttactgctgctggaagggggtggtgtgtcgccccaaaagcagggcttcaattaagaaatgcctgtttgaaaggtgtaccttgggtatcctgtctgagggtaactccagggtgcgccacaatgtggcctccgactgtggttgctttatgctagtgaaaagcgtggctgtgattaagcataacatggtgtgtggcaactgcgaggacagggcctctcagatgctgacctgctcggacggcaactgtcacttgctgaagaccattcacgtagccagccactctcgcaaggcctggccagtgtttgagcacaacatactgacccgctgttccttgcatttgggtaacaggaggggggtgttcctaccttaccaatgcaatttgagtcacactaagatattgcttgagcccgagagcatgtccaaggtgaacctgaacggggtgtttgacatgaccatgaagatctggaaggtgctgaggtacgatgagacccgcaccaggtgcagaccctgcgagtgtggcggtaaacatattaggaaccagcctgtgatgctggatgtgaccgaggagctgaggcccgatcacttggtgctggcctgcacccgcgctgagtttggctctagcgatgaagatacagattgaggtactgaaatgtgtgggcgtggcttaagggtgggaaagaatatataaggtgggggtctcatgtagttttgtatctgttttgcagcagccgccgccatgagcgccaactcgtttgatggaagcattgtgagctcatatttgacaacgcgcatgcccccatgggccggggtgcgtcagaatgtgatgggctccagcattgatggtcgccccgtcctgcccgcaaactctactaccttgacctacgagaccgtgtctggaacgccgttggagactgcagcctccgccgccgcttcagccgctgcagccaccgcccgcgggattgtgactgactttgctttcctgagcccgcttgcaagcagtgcagcttcccgttcatccgcccgcgatgacaagttgacggctcttttggcacaattggattctttgacccgggaacttaatgtcgtttctcagcagctgttggatctgcgccagcaggtttctgccctgaaggcttcctcccctcccaatgcggtttaaaacataaataaaaaccagactctgtttggatttggatcaagcaagtgtcttgctgtctttatttaggggttttgcgcgcgcggtaggcccgggaccagcggtctcggtcgttgagggtcctgtgtattttttccaggacgtggtaaaggtgactctggatgttcagatacatgggcataagcccgtctctggggtggaggtagcaccactgcagagcttcatgctgcggggtggtgttgtagatgatccagtcgtagcaggagcgctgggcgtggtgcctaaaaatgtctttcagtagcaagctgattgccaggggcaggcccttggtgtaagtgtttacaaagcggttaagctgggatgggtgcatacgtggggatatgagatgcatcttggactgtatttttaggttggctatgttcccagccatatccctccggggattcatgttgtgcagaaccaccagcacagtgtatccggtgcacttgggaaatttgtcatgtagcttagaaggaaatgcgtggaagaacttggagacgcccttgtgacctccaagattttccatgcattcgtccataatgatggcaatgggcccacgggcggcggcctgggcgaagatatttctgggatcactaacgtcatagttgtgttccaggatgagatcgtcataggccatttttacaaagcgcgggcggagggtgccagactgcggtataatggttccatccggcccaggggcgtagttaccctcacagatttgcatttcccacgctttgagttcagatggggggatcatgtctacctgcggggcgatgaagaaaaccgtttccggggtaggggagatcagctgggaagaaagcaggttcctaagcagctgcgacttaccgcagccggtgggcccgtaaatcacacctattaccggctgcaactggtagttaagagagctgcagctgccgtcatccctgagcaggggggccacttcgttaagcatgtccctgacttgcatgttttccctgaccaaatccgccagaaggcgctcgccgcccagcgatagcagttcttgcaaggaagcaaagtttttcaacggtttgaggccgtccgccgtaggcatgcttttgagcgtttgaccaagcagttccaggcggtcccacagctcggtcacgtgctctacggcatctcgatccagcatatctcctcgtttcgcgggttggggcggctttcgctgtacggcagtagtcggtgctcgtccagacgggccagggtcatgtctttccacgggcgcagggtcctcgtcagcgtagtctgggtcacggtgaaggggtgcgctccgggttgcgcgctggccagggtgcgcttgaggctggtcctgctggtgctgaagcgctgccggtcttcgccctgcgcgtcggccaggtagcatttgaccatggtgtcatagtccagcccctccgcggcgtggcccttggcgcgcagcttgcccttggaggaggcgccgcacgaggggcagtgcagacttttaagggcgtagagcttgggcgcgagaaataccgattccggggagtaggcatccgcgccgcaggccccgcagacggtctcgcattccacgagccaggtgagctctggccgttcggggtcaaaaaccaggtttcccccatgctttttgatgcgtttcttacctctggtttccatgagccggtgtccacgctcggtgacgaaaaggctgtccgtgtccccgtatacagacttgagaggcctgtcctcgagcggtgttccgcggtcctcctcgtatagaaactcggaccactctgagacgaaggctcgcgtccaggccagcacgaaggaggctaagtgggaggggtagcggtcgttgtccactagggggtccactcgctccagggtgtgaagacacatgtcgccctcttcggcatcaaggaaggtgattggtttataggtgtaggccacgtgaccgggtgttcctgaaggggggctataaaagggggtgggggcgcgttcgtcctcactctcttccgcatcgctgtctgcgagggccagctgttggggtgagtactccctctcaaaagcgggcatgacttctgcgctaagattgtcagtttccaaaaacgaggaggatttgatattcacctggcccgcggtgatgcctttgagggtggccgcgtccatctggtcagaaaagacaatctttttgttgtcaagcttggtggcaaacgacccgtagagggcgttggacagcaacttggcgatggagcgcagggtttggtttttgtcgcgatcggcgcgctccttggccgcgatgtttagctgcacgtattcgcgcgcaacgcaccgccattcgggaaagacggtggtgcgctcgtcgggcactaggtgcacgcgccaaccgcggttgtgcagggtgacaaggtcaacgctggtggctacctctccgcgtaggcgctcgttggtccagcagaggcggccgcccttgcgcgagcagaatggcggtagtgggtctagctgcgtctcgtccggggggtctgcgtccacggtaaagaccccgggcagcaggcgcgcgtcgaagtagtctatcttgcatccttgcaagtctagcgcctgctgccatgcgcgggcggcaagcgcgcgctcgtatgggttgagtgggggaccccatggcatggggtgggtgagcgcggaggcgtacatgccgcaaatgtcgtaaacgtagaggggctctctgagtattccaagatatgtagggtagcatcttccaccgcggatgctggcgcgcacgtaatcgtatagttcgtgcgagggagcgaggaggtcgggaccgaggttgctacgggcgggctgctctgctcggaagactatctgcctgaagatggcatgtgagttggatgatatggttggacgctggaagacgttgaagctggcgtctgtgagacctaccgcgtcacgcacgaaggaggcgtaggagtcgcgcagcttgttgaccagctcggcggtgacctgcacgtctagggcgcagtagtccagggtttccttgatgatgtcatacttatcctgtcccttttttttccacagctcgcggttgaggacaaactcttcgcggtctttccagtactcttggatcggaaacccgtcggcctccgaacggtaagagcctancatgtagaactggttgacggcctggtaggcgcagcatcccttttctacgggtagcgcgtatgcctgcgcggccttccggagcgaggtgtgggtgagcgcaaaggtgtccctaaccatgactttgaggtactggtatttgaagtcagtgtcgtcgcatccgccctgctcccagagcaaaaagtccgtgcgctttttggaacgcgggtttggcagggcgaaggtgacatcgttgaagagtatctttcccgcgcgaggcataaagttgcgtgtgatgcggaagggtcccggcacctcggaacggttgttaattacctgggcggcgagcacgatctcgtcaaagccgttgatgttgtggcccacaatgtaaagttccaagaagcgcgggatgcccttgatggaaggcaattttttaagttcctcgtaggtgagctcttcaggggagctgagcccgtgctctgaaagggcccagtctgcaagatgagggttggaagcgacgaatgagctccacaggtcacgggccattagcatttgcaggtggtcgcgaaaggtcctaaactggcgacctatggccattttttctggggtgatgcagtagaaggtaagcgggtcttgttcccagcggtcccatccaaggtccgcggctaggtctcgcgcggcggtcactagaggctcatctccgccgaacttcatgaccagcatgaagggcacgagctgcttcccaaaggcccccatccaagtataggtctctacatcgtaggtgacaaagagacgctcggtgcgaggatgcgagccgatcgggaagaactggatctcccgccaccagttggaggagtggctgttgatgtggtgaaagtagaagtccctgcgacgggccgaacactcgtgctggcttttgtaaaaacgtgcgcagtactggcagcggtgcacgggctgtacatcctgcacgaggttgacctgacgaccgcgcacaaggaagcagagtgggaatttgagcccctcgcctggcgggtttggctggtggtcttctacttcggctgcttgtccttgaccgtctggctgctcgaggggagttacggtggatcggaccaccacgccgcgcgagcccaaagtccagatgtccgcgcgcggcggtcggagcttgatgacaacatcgcgcagatgggagctgtccatggtctggagctcccgcggcgtcaggtcaggcgggagctcctgcaggtttacctcgcatagccgggtcagggcgcgggctaggtccaggtgatacctgatttccaggggctggttggtggcggcgtcgatggcttgcaagaggccgcatccccgcggcgcgactacggtaccgcgcggcgggcggtgggccgcgggggtgtccttggatgatgcatctaaaagcggtgacgcgggcgggcccccggaggtagggggggctcgggacccgccgggagagggggcaggggcacgtcggcgccgcgcgcgggcaggagctggtgctgcgcgcggaggttgctggcgaacgcgacgacgcggcggttgatctcctgaatctggcgcctctgcgtgaagacgacgggcccggtgagcttgaacctgaaagagagttcgacagaatcaatttcggtgtcgttgacggcggcctggcgcaaaatctcctgcacgtctcctgagttgtcttgataggcgatctcggccatgaactgctcgatctcttcctcctggagatctccgcgtccggctcgctccacggtggcggcgaggtcgttggagatgcgggccatgagctgcgagaaggcgttgaggcctccctcgttccagacgcggctgtagaccacgcccccttcggcatcgcgggcgcgcatgaccacctgcgcgagattgagctccacgtgccgggcgaagacggcgtagtttcgcaggcgctgaaagaggtagttgagggtggtggcggtgtgttctgccacgaagaagtacataacccagcgccgcaacgtggattcgttgatatcccccaaggcctcaaggcgctccatggcctcgtagaagtccacggcgaagttgaaaaactgggagttgcgcgccgacacggttaactcctcctccagaagacggatgagctcggcgacagtgtcgcgcacctcgcgctcaaaggctacaggggcctcttcttcttcttcaatctcctcttccataagggcctccccttcttcttcttctggcggcggtgggggaggggggacacggcggcgacgacggcgcaccgggaggcggtcgacaaagcgctcgatcatctccccgcggcgacggcgcatggtctcggtgacggcgcggccgttctcgcgggggcgcagttggaagacgccgcccgtcatgtcccggttatgggttggcggggggctgccgtgcggcagggatacggcgctaacgatgcatctcaacaattgttgtgtaggtactccgccaccgagggacctgagcgagtccgcatcgaccggatcggaaaacctctcgagaaaggcgtctaaccagtcacagtcgcaaggtaggctgagcaccgtggcgggcggcagcgggcggcggtcggggttgtttctggcggaggtgctgctgatgatgtaattaaagtaggcggtcttgagacggcggatggtcgacagaagcaccatgtccttgggtccggcctgctgaatgcgcaggcggtcggccatgccccaggcttcgttttgacatcggcgcaggtctttgtagtagtcttgcatgagcctttctaccggcacttcttcttctccttcctcttgtcctgcatctcttgcatctatcgctgcggcggcggcggagtttggccgtaggtggcgccctcttcctcccatgcgtgtgaccccgaagcccctcatcggctgaagcagggccaggtcggcgacaacgcgctcggctaatatggcctgctgcacctgcgtgagggtagactggaagtcgtccatgtccacaaagcggtggtatgcgcccgtgttgatggtgtaagtgcagttggccataacggaccagttaacggtctggtgacccggctgcgagagctcggtgtacctgagacgcgagtaagcccttgagtcaaagacgtagtcgttgcaagtccgcaccaggtactggtatcccaccaaaaagtgcggcggcggctggcggtagaggggccagcgtagggtggccggggctccgggggcgaggtcttccaacataaggcgatgatatccgtagatgtacctggacatccaggtgatgccggcggcggtggtggaggcgcgcggaaagtcacggacgcggttccagatgttgcgcagcggcaaaaagtgctccatggtcgggacgctctggccggtcaggcgcgcgcagtcgttgacgctctagaccgtgcaaaaggagagcctgtaagcgggcactcttccgtggtctggtggataaattcgcaagggtatcatggcggacgaccggggttcgaaccccggatccggccgtccgccgtgatccatgcggttaccgcccgcgtgtcgaacccaggtgtgcgacgtcagacaacgggggagcgctccttttggcttccttccaggcgcggcggatgctgcgctagcttttttggccactggccgcgcgcggcgtaagcggttaggctggaaagcgaaagcattaagtggctcgctccctgtagccggagggttattttccaagggttgagtcgcgggacccccggttcgagtctcgggccggccggactgcggcgaacgggggtttgcctccccgtcatgcaagaccccgcttgcaaattcctccggaaacagggacgagccccttttttgcttttcccagatgcatccggtgctgcggcagatgcgcccccctcctcagcagcggcaagagcaagagcagcggcagacatgcagggcaccctcccctcctcctaccgcgtcaggaggggcgacatccgcggttgacgcggcagcagatggtgattacgaacccccgcggcgccgggcccggcactacctggacttggaggagggcgagggcctggcgcggctaggagcgccctctcctgagcggtacccaagggtgcagctgaagcgtgatacgcgtgaggcgtacgtgccgcggcagaacctgtttcgcgaccgcgagggagaggagcccgaggagatgcgggatcgaaagttccacgcagggcgcgagctgcggcatggcctgaatcgcgagcggttgctgcgcgaggaggactttgagcccgacgcgcgaaccgggattagtcccgcgcgcgcacacgtggcggccgccgacctggtaaccgcatacgagcagacggtgaaccaggagattaactttcaaaaaagctttaacaaccacgtgcgtacgcttgtggcgcgcgaggaggtggctataggactgatgcatctgtgggactttgtaagcgcgctggagcaaaacccaaatagcaagccgctcatggcgcagctgttccttatagtgcagcacagcagggacaacgaggcattcagggatgcgctgctaaacatagtagagcccgagggccgctggctgctcgatttgataaacatcctgcagagcatagtggtgcaggagcgcagcttgagcctggctgacaaggtggccgccatcaactattccatgcttagcctgggcaagttttacgcccgcaagatataccataccccttacgttcccatagacaaggaggtaaagatcgaggggttctacatgcgcatggcgctgaaggtgcttaccttgagcgacgacctgggcgtttatcgcaacgagcgcatccacaaggccgtgagcgtgagccggcggcgcgagctcagcgaccgcgagctgatgcacagcctgcaaagggccctggctggcacgggcagcggcgatagagaggccgagtcctactttgacgcgggcgctgacctgcgctgggccccaagccgacgcgccctggaggcagctggggccggacctgggctggcggtggcacccgcgcgcgctggcaacgtcggcggcgtggaggaatatgacgaggacgatgagtacgagccagaggacggcgagtactaagcggtgatgtttctgatcagtcgcggccgcgatatcgctagcgaagttcctattctctagaaagtataggaacttcggatcctctagagtcgaaaaaaaaaaagcatgatgcaaaataaaaaactcaccaaggccatggcaccgagcgttggttttcttgtattccccttagtatgcggcgcgcggcgatgtatgaggaaggtcctcctccctcctacgagagtgtggtgagcgcggcgccagtggcggcggcgctgggttctcccttcgatgctcccctggacccgccgtttgtgcctccgcggtacctgcggcctaccggggggagaaacagcatccgttactctgagttggcacccctattcgacaccacccgtgtgtacctggtggacaacaagtcaacggatgtggcatccctgaactaccagaacgaccacagcaactttctgaccacggtcattcaaaacaatgactacagcccgggggaggcaagcacacagaccatcaatcttgacgaccggtcgcactggggcggcgacctgaaaaccatcctgcataccaacatgccaaatgtgaacgagttcatgtttaccaataagtttaaggcgcgggtgatggtgtcgcgcttgcctactaaggacaatcaggtggagctgaaatacgagtgggtggagttcacgctgcccgagggcaactactccgagaccatgaccatagaccttatgaacaacgcgatcgtggagcactacttgaaagtgggcagacagaacggggttctggaaagcgacatcggggtaaagtttgacacccgcaacttcagactggggtttgaccccgtcactggtcttgtcatgcctggggtatatacaaacgaagccttccatccagacatcattttgctgccaggatgcggggtggacttcacccacagccgcctgagcaacttgttgggcatccgcaagcggcaacccttccaggagggctttaggatcacctacgatgatctggagggtggtaacattcccgcactgttggatgtggacgcctaccaggcgagcttgaaagatgacaccgaacagggcgggggtggcgcaggcggcagcaacagcagtggcagcggcgcggaagagaactccaacgcggcagccgcggcaatgcagccggtggaggacatgaacgatcatgccattcgcggcgacacctttgccacacgggctgaggagaagcgcgctgaggccgaagcagcggccgaagctgccgcccccgctgcgcaacccgaggtcgagaagcctcagaagaaaccggtgatcaaacccctgacagaggacagcaagaaacgcagttacaacctaataagcaatgacagcaccttcacccagtaccgcagctggtaccttgcatacaactacggcgaccctcagaccggaatccgctcatggaccctgctttgcactcctgacgtaacctgcggctcggagcaggtctactggtcgttgccagacatgatgcaagaccccgtgaccttccgctccacgcgccagatcagcaactttccggtggtgggcgccgagctgttgcccgtgcactccaagagcttctacaacgaccaggccgtctactcccaactcatccgccagtttacctctctgacccacgtgttcaatcgctttcccgagaaccagattttggcgcgcccgccagcccccaccatcaccaccgtcagtgaaaacgttcctgctctcacagatcacgggacgctaccgctgcgcaacagcatcggaggagtccagcgagtgaccattactgacgccagacgccgcacctgcccctacgtttacaaggccctgggcatagtctcgccgcgcgtcctatcgagccgcactttttgagcaagcatgtccatccttatatcgcccagcaataacacaggctggggcctgcgcttcccaagcaagatgtttggcggggccaagaagcgctccgaccaacacccagtgcgcgtgcgcgggcactaccgcgcgccctggggcgcgcacaaacgcggccgcactgggcgcaccaccgtcgatgacgccatcgacgcggtggtggaggaggcgcgcaactacacgcccacgccgccgccagtgtccaccgtggacgcggccattcagaccgtggtgcgcggagcccggcgctacgctaaaatgaagagacggcggaggcgcgtagcacgtcgccaccgccgccgacccggcactgccgcccaacgcgcggcggcggccctgcttaaccgcgcacgtcgcaccggccgacgggcggccatgcgagccgctcgaaggctggccgcgggtattgtcactgtgccccccaggtccaggcgacgagcggccgccgcagcagccgcggccattagtgttatgactcagggtcgcaggggcaacgtgtactgggtgcgcgactcggttagcggcctgcgcgtgcccgtgcgcacccgccccccgcgcaactagattgcaataaaaaactacttagactcgtactgttgtatgtatccagcggcggcggcgcgcatcgaagctatgtccaagcgcaaaatcaaagaagagatgctccaggtcatcgcgccggagatctatggccccccgaagaaggaagagcaggattacaagccccgaaagctaaagcgggtcaaaaagaaaaagaaagatgatgatgatgatgaacttgacgacgaggtggaactgttgcacgcgaccgcgcccaggcgacgggtacagtggaaaggtcgacgcgtaagacgtgttttgcgacccggcaccaccgtagtctttacgcccggtgagcgctccacccgcacctacaagcgcgtgtatgatgaggtgtacggcgacgaggacctgcttgagcaggccaacgagcgcctcggggagtttgcctacggaaagcggcataaggacatgctggcgttgccgctggacgagggcaacccaacacctagcctaaagcccgtgacactgcagcaggtgctgcccgcgcttgcaccgtccgaagaaaagcgcggcctaaagcgcgagtctggtgacttggcacccaccgtgcagctgatggtacccaagcgtcagcgactggaagatgtcttggaaaaaatgaccgtggagcctgggctggagcccgaggtccgcgtgcggccaatcaagcaggtggcaccgggactgggcgtgcagaccgtggacgttcagatacccaccaccagtagcactagtattgccactgccacagagggcatggagacacaaacgtccccggttgcctcggcggtggcagatgccgcggtgcaggcggccgctgcggccgcgtccaagacctctacggaggtgcaaacggacccgtggatgtttcgtgtttcagccccccggcgtccgcgccgttcaaggaagtacggcgccgccagcgcgctactgcccgaatatgccctacatccttccatcgcgcctacccccggctatcgtggctacacctaccgccccagaagacgagcaactacccgacgccgaaccaccactggaacccgccgccgccgtcgccgtcgccagcccgtgctggccccgatttccgtgcgcagggtggctcgcgaaggaggcaggaccctggtgctgccaacagcgcgctaccaccccagcatcgtttaaaagccggtctttgtggttcttgcagatatggccctcacctgccgcctccgtttcccggtgccgggattccgaggaagaatgcaccgtaggaggggcatggccggccacggcctgacgggcggcatgcgtcgtgcgcaccaccggcggcggcgcgcgtcgcaccgtcgcatgcgcgccggtatcctgcccctccttattccactgatcgccgcggcgattggcgccgtgcccggaattgcatccgtggccttgcaggcgcagagacactgattaaaaacaagttacatgtggaaaaatcaaaataaaagtctggactctcacgctcgcttggtcctgtaactattttgtagaatggaagacatcaactttgcgtcactggccccgcgacacggctcgcgcccgttcatgggaaactggcaagatatcggcaccagcaatatgagcggtggcgccttcagctggggctcgctgtggagcggcattaaaaatttcggttccgccgttaagaactatggcagcaaagcctggaacagcagcacaggccagatgctgagggacaagttgaaagagcaaaatttccaacaaaaggtggtagatggcctggcctctggcattagcggggtggtggacctggccaaccaggcagtgcaaaataagattaacagtaagcttgatccccgccctcccgtagaggagcctccaccggccgtggagacagtgtctccagaggggcgtggcgaaaagcgtccgcgacccgacagggaagaaactctggtgacgcaaatagacgagcctccctcgtacgaggaggcactaaagcaaggcctgcccaccacccgtcccatcgcgcccatggctaccggagtgctgggccagcacacacccgtaacgctggacctgcctccccccgccgacacccagcagaaacctgtgctgccaggcccgtccgccgttgttgtaacccgtcctagccgcgggtccctgcgccgcgccgccagcggtccgcgatcgttgcggcccgtagccagtggcaactggcaaagcacactgaacagcatcgtgggtctgggggtgcaatccctgaagcgccgacgatgcttctgatcgcggccgcgatatcgctagcgaattcgaagttcctattctctagaaagtataggaacttcggatcctctagagtcgatagctaacgtgtcgtatgtgtgtcatgtatgcgtccatgtcgccgccagaggagctgctgagccgccgcgcgcccgctttccaagatggctaccccttcgatgatgccgcagtggtcttacatgcacatctcgggccaggacgcctcggagtacctgagccccgggctggtgcagtttgcccgcgccaccgagacgtacttcagcctgaataacaagtttagaaaccccacggtggcgcctacgcacgacgtgaccacagaccggtcccagcgtttgacgctgcggttcatccctgtggaccgtgaggatactgcgtactcgtacaaggcgcggttcaccctagctgtgggtgataaccgtgtgctggacatggcttccacgtactttgacatccgcggcgtgctggacaggggccccacttttaagccctactccggcactgcctacaacgccctagctcccaagggtgcccccaactcatgcgagtgggatgaagatgatactcaggtacaggtagcggctgaagacgatcaagacgacgacgaagaagaggaacaactacctcagcagagaaatggcaaaaaaactcacgtatatgctcaggcaccgtttgctggcgaagcaattaacaaaaacggcctgcagataggaactaacggtgcagccactgaaggaaataaggaaatttacgcagataaaacttatcaacctgaaccacaaataggagaatcacagtggaacgaagccgaatcgtccgtagcaggtggaagggttcttaaaaagactactcccatgaaaccatgctatggctcctatgccagacctaccaattctaacggaggtcagggcgttatggttgaacaaaatggtaaattggaaagtcaagtagaaatgcaatttttttcaacttctgtaaatgctatgaacgaggcaaacgctattcaacctaaactagtgttgtatagtgaagatgtaaatatggaaaccccagacactcatctttcttataagcctggaaaaagtgatgataattctaaggcaatgttgggtcaacaatctatgccaaacagacccaattacatagctttcagggacaattttattggcctaatgtattacaacagcactggtaacatgggtgttcttgctggtcaggcatcacagctaaatgctgtcgtagatttgcaagacagaaacacagagctgtcctaccaacttttgcttgattctattggtgatcgaaccagatacttttccatgtggaatcaggctgtagacagctacgatccagatgttagaattatcgagaaccatggaactgaggatgaattgccaaattattgttttcctcttggcggaattggggtgacggacacctatcaagctattaaggctacaaatggaaatggaggcgccactacctgggctcaggacaatacttttgcagaacgaaatgaaataggggtgggaaataactttgccatggaaattaacctgaatgccaacctatggagaaatttcctttactccaatattgcgctgtacctgccagacaagctaaaatacaaccccaccaatgtggaaatatctgacaatcccaacacctacgactacatgaacaagcgagtggtggctcccgggctggtggattgctacattaaccttggggcgcgctggtctctggactacatggacaacgttaatccctttaaccaccaccgcaatgcgggcctgcgttaccgctccatgttgttgggaaacggccgctacgtgccctttcacattcaggtgccccaaaagttttttgccattaaaaacctcctcctcctgccaggctcatacacatatgaatggaacttcaggaaggatgttaacatggttctgcagagctctctgggaaacgaccttagagttgacggggctagcattaagtttgacagcatttgtctttacgccaccttcttccccatggcccacaacacggcctccacgctggaagccatgctcagaaatgacaccaacgaccagtcctttaatgactacctttccgccgccaacatgctatatcccatacccgccaacgccaccaacgtgcccatctccatcccatcgcgcaactgggcagcatttcgcggttgggccttcacacgcttgaagacaaaggaaaccccttccctgggatcaggctacgacccttactacacctactctggctccataccataccttgacggaaccttctatcttaatcacacctttaagaaggtggccattacttttgactcttctgttagctggccgggcaacgaccgcctgcttactcccaatgagtttgagattaagcgctcagttgacggggagggctataacgtagctcagtgcaacatgacaaaggactggttcctagtgcagatgttggccaactacaatattggctaccagggcttctacattccagaaagctacaaagaccgcatgtactcgttcttcagaaacttccagcccatgagccggcaagtggtggacgatactaaatacaaagattatcagcaggttggaattatccaccagcataacaactcaggcttcgtaggctacctcgctcccaccatgcgcgagggacaagcttaccccgctaatgttccctacccactaataggcaaaaccgcggttgatagtattacccagaaaaagtttctttgcgaccgcaccctgtggcgcatccccttctccagtaactttatgtccatgggtgcgctcacagacctgggccaaaaccttctctacgcaaactccgcccacgcgctagacatgacctttgaggtggatcccatggacgagcccacccttctttatgttttgtttgaagtctttgacgtggtccgtgtgcaccagccgcaccgcggcgtcatcgagaccgtgtacctgcgcacgcccttctcggccggcaacgccacaacataaagaagcaagcaacatcaacaacagctgccgccatgggctccagtgagcaggaactgaaagccattgtcaaagatcttggttgtgggccatattttttgggcacctatgacaagcgcttcccaggctttgtttccccacacaagctcgcctgcgccatagttaacacggccggtcgcgagactgggggcgtacactggatggcctttgcctggaacccgcgctcaaaaacatgctacctctttgagccctttggcttttctgaccaacgtctcaagcaggtttaccagtttgagtacgagtcactcctgcgccgtagcgccattgcctcttcccccgaccgctgtataacgctggaaaagtccacccaaagcgtgcaggggcccaactcggccgcctgtggcctattctgctgcatgtttctccacgcctttgccaactggccccaaactcccatggatcacaaccccaccatgaaccttattaccggggtacccaactccatgcttaacagtccccaggtacagcccaccctgcgccgcaaccaggaacagctctacagcttcctggagcgccactcgccctacttccgcagccacagtgcgcaaattaggagcgccacttctttttgtcacttgaaaaacatgtaaaaataatgtactaggagacactttcaataaaggcaaatgtttttatttgtacactctcgggtgattatttacccccacccttgccgtctgcgccgtttaaaaatcaaaggggttctgccgcgcatcgctatgcgccactggcagggacacgttgcgatactggtgtttagtgctccacttaaactcaggcacaaccatccgcggcagctcggtgaagttttcactccacaggctgcgcaccatcaccaacgcgtttagcaggtcgggcgccgatatcttgaagtcgcagttggggcctccgccctgcgcgcgcgagttgcgatacacagggttacagcactggaacactatcagcgccgggtggtgcacgctggccagcacgctcttgtcggagatcanatccgcgtccaggtcctccgcgttgctcagggcgaacggagtcaactttggtagctgccttcccaaaaagggtgcatgcccaggctttgagttgcactcgcaccgtagtggcatcagaaggtgaccgtgcccagtctgggcgttaggatacagcgcctgcatgaaagccttgatctgcttaaaagccacctgagcctttgcgccttcagagaagaacatgccgcaagacttgccggaaaactgattggccggacaggccgcgtcatgcacgcagcaccttgcgtcggtgttggagatctgcaccacatttcggccccaccggttcttcacgatcttggccttgctagactgctccttcagcgcgcgctgcccgttttcgctcgtcacatccatttcaatcacgtgctccttatttatcataatgctcccgtgtagacacttaagctcgccttcgatctcagcgcagcggtgcagccacaacgcgcagcccgtgggctcgtggtgcttgtaggttacctctgcaaacgactgcaggtacgcctgcaggaatcgccccatcatcgtcacaaaggtcttgttgctggtgaaggtcagctgcaacccgcggtgctcctcgtttagccaggtcttgcatacggccgccagagcttccacttggtcaggcagtagcttgaagtttgcctttagatcgttatccacgtggtacttgtccatcaacgcgcgcgcagcctccatgcccttctcccacgcagacacgatcggcaggctcagcgggtttatcaccgtgctttcactttccgcttcactggactcttccttttcctcttgcatccgcataccccgcgccactgggtcgtcttcattcagccgccgcaccgtgcgcttacctcccttgccgtgcttgattagcaccggtgggttgctgaaacccaccatttgtagcgccacatcttctctttcttcctcgctgtccacgatcacctctggggatggcgggcgctcgggcttgggagaggggcgcttctttttctttttggacgcaatggccaaatccgccgtcgaggtcgatggccgcgggctgggtgtgcgcggcaccagcgcatcttgtgacgagtcttcttcgtcctcggactcgagacgccgcctcagccgcttttttgggggcgcgcggggaggcggcggcgacggcgacggggacgagacgtcctccatggttggtggacgtcgcgccgcaccgcgtccgcgctcgggggtggtttcgcgctgctcctcttcccgactggccatttccttctcctataggcagaaaaagatcatggagtcagtcgagaaggaggacagcctaaccgccccctttgagttcgccaccaccgcctccaccgatgccgccaacgcgcctaccaccttccccgtcgaggcacccccgcttgaggaggaggaagtgattatcgagcaggacccaggttttgtaagcgaagacgacgaagatcgctcagtaccaacagaggataaaaagcaagaccaggacgacgcagaggcaaacgaggaacaagtcgggcggggggaccaaaggcatggcgactacctagatgtgggagacgacgtgctgttgaagcatctgcagcgccagtgcgccattatctgcgacgcgttgcaagagcgcagcgatgtgcccctcgccatagcggatgtcagccttgcctacgaacgccacctgttctcaccgcgcgtaccccccaaacgccaagaaaacggcacatgcgagcccaacccgcgcctcaacttctaccccgtatttgccgtgccagaggtgcttgccacctatcacatctttttccaaaactgcaagatacccctatcctgccgtgccaaccgcagccgagcggacaagcagctggccttgcggcagggcgctgtcatacctgatatcgcctcgctcgacgaagtgccaaaaatctttgagggtcttggacgcgacgagaagcgcgcggcaaacgctctgcaacaagaaaacagcgaaaatgaaagtcactgtggagtgctggtggaacttgagggtgacaacgcgcgcctagccgtgctgaaacgcagcatcgaggtcacccactttgcctacccggcacttaacctaccccccaaggttatgagcacagtcatgagcgagctgatcgtgcgccgtgcacgacccctggagagggatgcaaacttgcaagaacaaaccgaggagggcctacccgcagttggcgatgagcagctggcgcgctggcttgagacgcgcgagcctgccgacttggaggagcgacgcaagctaatgatggccgcagtgcttgttaccgtggagcttgagtgcatgcagcggttctttgctgacccggagatgcagcgcaagctagaggaaacgttgcactacacctttcgccagggctacgtgcgccaggcctgcaaaatttccaacgtggagctctgcaacctggtctcctaccttggaattttgcacgaaaaccgccttgggcaaaacgtgcttcattccacgctcaagggcgaggcgcgccgcgactacgtccgcgactgcgtttacttatttctgtgctacacctggcaaacggccatgggcgtgtggcagcagtgcctggaggagcgcaacctgaaggagctgcagaagctgctaaagcaaaacttgaaggacctatggacggccttcaacgagcgctccgtggccgcgcacctggcggacattatcttccccgaacgcctgcttaaaaccctgcaacagggtctgccagacttcaccagtcaaagcatgttgcaaaactttaggaactttatcctagagcgttcaggaattctgcccgccacctgctgtgcgcttcctagcgactttgtgcccattaagtaccgtgaatgccctccgccgctttggggtcactgctaccttntgcagctagccaactaccttgcctaccactccgacatcatggaagacgtgagcggtgacggcctactggagtgtcactgtcgctgcaacctatgcaccccgcaccgctccctggtctgcaattcacaactgcttagcgaaagtcaaattatcggtacctttgagctgcagggtccctcgcctgacgaaaagtccgcggctccggggttgaaactcactccggggctgtggacgtcggcttaccttcgcaaatttgtacctgaggactaccacgcccacgagattaggttctacgaagaccaatcccgcccgccaaatgcggagcttaccgcctgcgtcattacccagggccacatccttggccaattgcaagccattaacaaagcccgccaagagtttctgctacgaaagggacggggggtttacttggacccccagtccggcgaggagctcaacccaatccccccgccgccgcagccctatcagcagccgcgggcccttgcttcccaggatggcacccaaaaagaagctgcagctgccgccgccgccacccacggacgaggaggaatactgggacagtcaggcagaggaggttttggacgaggaggaggagatgatggaagactgggacagcctagacgaggaagcttccgaggccgaagaggtgtcagacgaaacaccgtcaccctcggtcgcattcccctcgccggcgccccagaaatcggcaaccgttcccagcattgctacaacctccgctcctcaggcgccgccggcactgcccgttcgccgacccaaccgtagatgggacaccactggaaccagggccggtaagtctaagcagccgccgccgttagcccaagagcaacaacagcgccaaggctaccgctcgtggcgcgtgcacaagaacgccatagttgcttgcttgcaagactgtgggggcaacatctccttcgcccgccgctttcttctctaccatcacggcgtggccttcccccgtaacatcctgcattactaccgtcatctctacagcccctactgcaccggcggcagcggcagcaacagcagcggccacgcagaagcaaaggcgaccggatagcaagactctgacaaagcccaagaaatccacagcggcggcagcagcaggaggaggagcactgcgtctggcgcccaacgaacccgtatcgacccgcgagcttagaaacaggatttttcccactctgtatgctatatttcaacagagcaggggccaagaacaagagctgaaaataaaaaacaggtctctgcgctccctcacccgcagctgcctgtatcacaaaagcgaagatcagcttcggcgcacgctggaagacgcggaggctctcttcagcaaatactgcgcgctgactcttaaggactagtttcgcgccctttctcaaatttaagcgcgaaaactacgtcatctccagcggccacacccggcgccagcacctgtcgtcagcgccattatgagcaaggaaattcccacgccctacatgtggagttaccagccacaaatgggacttgcggctggagctgcccaagactactcaacccgaataaactacatgagcgcgggaccccacatgatatcccgggtcaacggaatccgcgcccaccgaaaccgaattctcctcgaacaggcggctattaccaccacacctcgtaataaccttaatccccgtagttggcccgctgccctggtgtaccaggaaagtcccgctcccaccactgtggtacttcccagagacgcccaggccgaagttcagatgactaactcaggggcgcagcttgcgggcggctttcgtcacagggtgcggtcgcccgggcagggtataactcacctgaaaatcagagggcgaggtattcagctcaacgacgagtcggtgagctcctctcttggtctccgtccggacgggacatttcagatcggcggcgctggccgctcttcatttacgccccgtcaggcgatcctaactctgcagacctcgtcctcggagccgcgctccggaggcattggaactctacaatttattgaggagttcgtgccttcggtttacttcaaccccttttctggacctcccggccactacccggaccagtttattcccaactttgacgcggtaaaagactcggcggacggctacgactgacagatctgagctcgcggccgcgatatcgctagcgaagttcctattctctagaaagtataggaacttcgatcctctagagtcgacctgcaggcatgcaagcttggcactgcaataaattacttacttaaaatcagtcagcaaatctttgtccagcttattcagcatcacctcctttccctcctcccaactctggtatttcagcagccttttagctgcgaactttctccaaagtctaaatgggatgtcaaattcctcatgttcttgtccctccgcacccactatcttcatattgttgcagatgaaacgcgccagaccgtctgaagacaccttcaaccctgtgtacccatatgacacggaaaccggccctccaactgtgcctttccttacccctccctttgtgtcgccaaatgggttccaagaaagtccccccggagtgctttctttgcgtctttcagaacctttggttacctcacacggcatgcttgcgctaaaaatgggcagcggcctgtccctggatcaggcaggcaaccttacatcaaatacaatcactgtttctcaaccgctaaaaaaaacaaagtccaatataactttggaaacatccgcgccccttacagtcagctcaggcgccctaaccatggccacaacttcgcctttggtggtctctgacaacactcttaccatgcaatcacaagcaccgctaaccgtgcaagactcaaaacttagcattgctaccaaagagccacttacagtgttagatggaaaactggccctgcagacatcagcccccctctctgccactgataacaacgccctcactatcactgcctcacctcctcttactactgcaaatggtagtctggctgttaccatggaaaacccactttacaacaacaatggaaaacttgggctcaaaattggcggtcctttgcaagtggccaccgactcacatgcactaacactaggtactggtcagggggttgcagttcataacaatttgctacatacaaaagttacaggcgcaatagggtttgatacatctggcaacatggaacttaaaactggagatggcctctatgtggatagcgccggtcctaaccaaaaactacatattaatctaaataccacaaaaggccttgcttttgacaacaccgcaataacaattaacgctggaaaagggttggaatttgaaacagactcctcaaacggaaatcccataaaaacaaaaattggatcaggcatacaatataataccaatggagctatggttgcaaaacttggaacaggcctcagttttgacagctccggagccataacaatgggcagcataaacaatgacagacttactctttggacaacaccagacccatccccaaattgcagaattgcttcagataaagactgcaagctaactctggcgctaacaaaatgtggcagtcaaattttgggcactgtttcagctttggcagtatcaggtaatatggcctccatcaatggaactctaagcagtgtaaacttggttcttagatttgatgacaacggagtgcttatgtcaaattcatcactggacaaacagtattggaactttagaaacggggactccactaacggtcaaccatacacttatgctgttgggtttatgccaaacctaaaagcttacccaaaaactcaaagtaaaactgcaaaaagtaatattgttagccaggtgtatcttaatggtgacaagtctaaaccattgcattttactattacgctaaatggaacagatgaaaccaaccaagtaagcaaatactcaatatcattcagttggtcctggaacagtggacaatacactaatgacaaatttgccaccaattcctataccttctcctacattgcccaggaataaagaatcgtgaacctgttgcatgttatgtttcaacgtgtttatttttcaattcgtattagtcatcgctattaccatggtgatgcggttttggcagtacatcaatgggcgtggatagcggtttgactcacggggatttccaagtctccaccccattgacgtcaatgggagtttgttttggcaccaaaatcaacgggactttccaaaatgtcgtaacaactccgccccattgacgcaaatgggcggtaggcgtgtacggtgggaggtctatataagcagagctggtttagtgaaccgtcagatccgctagagatccaccatgtttgtctttctcgtgctgctgcccctcgtgagcagccagtgcgtcaatctgacaacaaggacccagctgccccccgcctacaccaactccttcacaagaggcgtgtattaccccgataaggtcttcagatccagcgtcctccacagcacccaagatttgtttctgcctttcttcagcaacgtgacatggttccacgccattcatgtcagcggcacaaacggcacaaagaggtttgacaaccccgtgctccccttcaacgacggcgtgtacttcgccagcacagagaaatccaatatcattaggggctggatcttcggcacaacactggattccaagacccagtctctgctcattgtgaataacgccaccaacgtggtgattaaggtctgtgagtttcagttctgcaacgacccctttctgggagtctactaccacaagaataataagagctggatggagtccgagtttagggtgtacagctccgccaacaactgtaccttcgaatacgtgtcccagcctttcctcatggatctggagggcaagcaaggcaatttcaaaaatctgagagagttcgtgttcaaaaacattgatggatacttcaaaatctacagcaagcatacccccattaatctggtgagggatctgccccaaggattctccgctctggaacctctggtggatctgcccattggcattaacatcacaagattccagaccctcctcgccctccatagatcctatctgacccccggcgactcctccagcggatggacagccggagctgccgcctactacgtgggctatctgcagccaagaacctttctgctgaagtacaacgagaacggcaccatcacagacgctgtcgattgcgctctcgaccctctgagcgagaccaaatgcacactgaagagcttcaccgtggaaaagggcatctatcagaccagcaacttcagagtgcagcctaccgagagcattgtgaggtttcccaacatcaccaatctgtgtcctttcggcgaggtctttaatgccacaaggttcgcttccgtgtatgcttggaataggaagaggatcagcaattgcgtcgccgactattccgtcctctataacagcgcctccttctccaccttcaaatgttatggcgtgtcccccaccaagctcaacgacctctgcttcaccaatgtgtacgctgactccttcgtcattaggggcgacgaggtgaggcaaattgcccccggccagaccggcaagattgctgattacaactacaaactgcccgacgattttaccggctgcgtgatcgcttggaactccaacaatctggactccaaagtgggcggaaactacaattacctctacagactctttagaaaaagcaatctgaagcccttcgagagagacatctccaccgaaatctaccaagccggaagcacaccttgcaatggcgtcgagggatttaactgctacttccctctgcagagctacggctttcaacctaccaacggcgtcggatatcaaccctatagggtggtcgtgctgagctttgaactgctgcatgctcccgccaccgtctgcggacctaagaagagcaccaatctcgtcaaaaacaagtgcgtgaacttcaacttcaatggactgaccggcaccggcgtgctgaccgagagcaataagaagtttctgcccttccagcagttcggaagggatattgccgataccacagatgctgtgagggacccccaaaccctcgagattctggatatcaccccttgcagcttcggaggagtgtccgtgatcacccccggaacaaacacctccaatcaagtggctgtgctgtaccaagacgtgaactgcacagaagtccccgtggccatccatgccgaccagctgacccctacatggagagtgtactccaccggcagcaatgtgttccagacaagagccggatgcctcattggagctgaacacgtcaacaacagctacgagtgcgacattcccatcggcgccggcatttgtgcctcctatcagacccagaccaacagcccaagaagggctagaagcgtcgcttcccaatccatcattgcctacaccatgtctctgggagccgaaaactccgtcgcctactccaacaatagcatcgccatccccaccaattttaccatctccgtgaccacagagattctgcccgtgtccatgacaaagacatccgtggactgcaccatgtacatctgtggcgacagcaccgagtgtagcaatctgctgctgcaatatggcagcttctgcacccagctgaacagagccctcaccggcatcgccgtcgaacaagacaagaacacccaagaggtgttcgcccaagtgaagcaaatctacaagaccccccctatcaaagatttcggaggattcaactttagccagattctgcccgatcctagcaagccttccaagaggagcttcatcgaggatctgctgtttaataaggtgacactggccgacgctggcttcattaaacagtacggcgattgtctgggcgacatcgctgctagggatctgatctgcgctcagaagttcaacggactgacagtcctccctcctctgctgaccgacgagatgatcgctcagtataccagcgctctgctggctggaaccattaccagcggctggacattcggcgctggagccgccctccaaattccctttgccatgcagatggcctatagattcaacggcattggcgtcacccaaaatgtgctgtatgaaaatcagaagctgattgctaaccaattcaatagcgccattggcaagatccaagactctctgagctccacagccagcgccctcggaaagctgcaagacgtggtgaatcaaaacgcccaagctctgaacacactggtgaaacagctcagcagcaactttggagccatcagcagcgtgctcaatgatatcctctctaggctggacaaagtggaggccgaagtccagatcgatagactcatcaccggcagactccaatctctgcagacatacgtcacccaacagctcattagagctgccgaaatcagagcctccgccaatctggccgccaccaagatgtccgagtgcgtgctgggacagagcaagagagtggacttctgtggcaagggataccatctgatgagcttcccccagagcgctccccatggagtggtctttctgcatgtcacatacgtgcccgcccaagagaagaacttcaccaccgctcccgccatttgccacgatggaaaggcccactttcccagagaaggagtgttcgtgagcaacggcacacactggtttgtcacccagagaaatttttacgagccccagattatcaccaccgacaacaccttcgtgtccggaaactgcgatgtcgtgattggcatcgtgaacaacacagtctacgaccctctgcagcccgaactcgacagcttcaaggaagagctggacaagtacttcaagaatcacacatcccccgacgtggatctgggcgacattagcggcattaatgcctccgtcgtcaacattcagaaggagattgatagactgaatgaagtcgccaagaacctcaatgagtctctgattgatctgcaagagctgggcaagtacgagcaatacatcaaatggccttggtacatctggctgggattcatcgctggactcatcgccatcgtgatggtcaccattatgctgtgttgcatgaccagctgctgcagctgtctgaagggctgctgcagctgcggaagctgctgcaagtttgacgaagacgactccgagcccgtgctgaagggcgtcaagctgcattatacataaactagtgctggaattcgcccttatagagtgctggaattcgcccttatagagtgctggaattcgcccttatatctagtaacggccgccagtgtgctggaattcgcccttataacttcgtatagcatacattatacgaagttataagggcgaattctgcagatatccatcctttaaaaaacctcccacacctccccctgaacctgaaacataaaatgaatgcaattgttgttgttaacttgtttattgcagcttataatggttacaaataaagcaatagcatcacaaatttcacaaataaagcatttttttcactgcattctagttgtggtttgtccaaactcatcaatgtatcttaacaacgtgtttatttttcaattgcagaaagaattgcagaaaatttcaagtcatttttcattcagtagtatagccccaccaccacatagcttatactaatcaccgtaccttaatcaaactcacagaaccctagtattcaacctgccacctccctcccaacacacagagtacacagtcctttctccccggctggccttaaacagcatcatatcatgggtaacagacatattcttaggtgttatattccacacggtctcctgtcgagccaaacgctcatcagtgatgttaataaactccccgggcagctcgcttaagttcatgtcgctgtccagctgctgagccacaggctgctgtccaacttgcggttgctcaacgggcggcgaaggagaagtccacgcctacatgggggtagagtcataatcgtgcatcaggatagggcggtggtgctgcagcagcgcgcgaataaactgctgccgccgccgctccgtcctgcaggaatacaacatggcagtggtctcctcagcgatgattcgcaccgcccgcagcataaggcgccttgtcctccgggcacagcagcgcaccctgatctcacttaagtcagcacagtaactgcagcacagtaccacaatattgtttaaaatcccacagtgcaaggcgctgtatccaaagctcatggcggggaccacagaacccacgtggccatcataccacaagcgcaggtagattaagtggcgacccctcataaacacgctggacataaacattacctcttttggcatgttgtaattcaccacctcccggtaccatataaacctctgattaaacatggcgccatccaccaccatcctaaaccagctggccaaaacctgcccgccggctatgcactgcagggaaccgggactggaacaatgacagtggagagcccaggactcgtaaccatggatcatcatgctcgtcatgatatcaatgttggcacaacacaggcacacgtgcatacacttcctcaggattacaagctcctcccgcgtcagaaccatatcccagggaacaacccattcctgaatcagcgtaaatcccacactgcagggaagacctcgcacgtaactcacgttgtgcattgtcaaagtgttacattcgggcagcagcggatgatcctccagtatggtagcgcgtgtctctgtctcaaaaggaggtaggcgatccctactgtacggagtgcgccgagacaaccgagatcgtgttggtcgtagtgtcatgccaaatggaacgccggacgtagtcatatttcctgaagcaaaaccaggtgcgggcgtgacaaacagatctgcgtctccggtctcgtcgcttagctcgctctgtgtagtagttgtagtatatccactctctcaaagcatccaggcgccccctggcttcgggttctatgtaaactccttcatgcgccgctgccctgataacatccaccaccgcagaataagccacacccagccaacctacacattcgttctgcgagtcacacacgggaggagcgggaagagctggaagaaccatgttttttttttttattccaaaagattatccaaaacctcaaaatgaagatctattaagtgaacgcgctcccctccggtggcgtggtcaaactctacagccaaagaacagataatggcatttgtaagatgttgcacaatggcttccaaaaggcaaactgccctcacgtccaagtggacgtaaaggctaaacccttcanggtgaatctcctctataaacattccagcaccttcaaccatgcccaaataattttcatctcgccaccttatcaatatgtctctaagcaaatcccgaatattaagtccggccattgtaaaaatctgctccagagcgccctccaccttcagcctcaagcagcgaatcatgattgcaaaaattcaggttcctcacagacctgtataagattcaaaagcggaacattaacaaaaataccgcgatcccgtaggtcccttcgcagggccagctgaacataatcgtgcaggtctgcacggaccagcgcggccacttccccgccaggaaccatgacaaaagaacccacactgattatgacacgcatactcggagctatgctaaccagcgtagccccgatgtaagcttgttgcatgggcggcgatataaaatgcaaggtactgctcaaaaaatcaggcaaagcctcgcgcaaaaaagcaagcacatcgtagtcatgctcatgcagataaaggcaggtaagttccggaaccaccacagaaaaagacaccatttttctctcaaacatgtctgcgggttcctgcataaacacaaaataaaataacaaaaaaaaaaaaacatttaaacattagaagcctgtcttacaacaggaaaaacaacccttataagcataagacggactacggccatgccggcgtgaccgtaaaaaaactggtcaccgtgattaaaaagcaccaccgacagttcctcggtcatgtccggagtcataatgtaagactcggtaaacacatcaggttggttaacatcggtcagtgctaaaaagcgaccgaaatagcccgggggaatacatacccgcaggcgtagagacaacattacagcccccataggaggtataacaaaattaataggagagaaaaacacataaacccctgaaaaaccctcctgcccctaggcaaaatagcaccctcccgctccagaacaacatacagcgcttccacagcggcagccataacagtcagccttaccagtaaaaaaacctattaaaaaacaccactcgacacggcaccagctcaatcagtcacagtgtaaaaagggccaagtacagagcgagtatatataggactaaaaaatgacgtaacggttaaagtccacaaaaaccacccagaaaaccgcacgcgaacctacgcccagaaacgaaagccaaaaaacccacaacttcctcaaatcttcacttccgttttcccacgatacgtcacttcccattttaaaaaaaaactacaattcccaatacatgcaagttactccgccctaaaacctacgtcacccgccccgttcccacgccccgcgccacgtcacaaactccaccccctcattatcatattggcttcaatccaaaataaggtatattattgatgatggcgat

SEQ ID NO: 37 - DNA, 35792 bp, Artificial
  nucleic acid sequence of SC-Ad-F-657-(delta)IIIF-(delta)E3-SpikePP-3X-L
  misc_feature (7190)..(7190): n is a, c, g, or t
  misc_feature (21158)..(21158): n is a, c, g, or t
  misc_feature (24094)..(24094): n is a, c, g, or t
  misc_feature (34382)..(34382): n is a, c, g, or t
cgccatcatcaataatataccttattttggattgaagccaatatgataatgagggggtggagtttgtgacgtggcgcggggcgtgggaacggggcgggtgacgtagtagtgtggcggaagtgtgatgttgtaagtgtggcggaacacatgtaagcgccggatgtggtaaaagtgacgtttttggtgtgcgccggtgtacacgggaagtgacaattttcgcgcggttttaggcggatgttgtagtaaatttgggcgtaaccaagtaatatttggccattttcgcgggaaaactgaataagaggaagtgaaatctgaataattctgtgttactcatagcgcgtaatatttgtctagggccgcggggactttgaccgtttacgtggagactcgcccaggtgtttttctcaggtgttttccgcgttccgggtcaaagttggcgttttattattatagtcagctgacgcgcagtgtatttatacccggtgagttcctcaagaggccactcttgagtgccagcgagtagagttttctcctccgagccgctccgacaccgggactgaaaatgagacatattatctgccacggaggtgttattaccgaagaaatggccgccagtcttttggaccagctgatcgaagaggtactggctgataatcttccacctcctagccattttgaaccacctacccttcacgaactgtatgatttagacgtgacggcccccgaagatcccaacgaggaggcggtttcgcagatttttcccgagtctgtaatgttggcggtgcaggaagggattgacttattcacttttccgccggcgcccggttctccggagccgcctcacctttcccggcagcccgagcagccggagcagagagccttgggtccggtttctatgccaaaccttgtgccggaggtgatcgatcttacctgccacgaggctggctttccacccagtgacgacgaggatgaagagggtgaggagtttgtgttagattatgtggagcaccccgggcacggttgcaggtcttgtcattatcaccggaggaatacgggggacccagatattatgtgttcgctttgctatatgaggacctgtggcatgtttgtctacagtaagtgaaaaattatgggcagtgggtgatagagtggtgggtttggtgtggtaattttttttttaatttttacagttttgtggtttaaagaattttgtattgtgattttttaaaaggtcctgtgtctgaacctgagcctgagcccgagccagaaccggagcctgcaagacctacccggcgtcctaaattggtgcctgctatcctgagacgcccgacatcacctgtgtctagagaatgcaatagtagtacggatagctgtgactccggtccttctaacacacctcctgagatacacccggtggtcccgctgtgccccattaaaccagttgccgtgagagttggtgggcgtcgccaggctgtggaatgtatcgaggacttgcttaacgagtctgggcaacctttggacttgagctgtaaacgccccaggccataaggtgtaaacctgtgattgcgtgtgtggttaacgcctttgtttgctgaatgagttgatgtaagtttaataaagggtgagataatgtttaacttgcatggcgtgttaaatggggcggggcttaaagggtatataatgcgccgtgggctaatcttggttacatctgacctcatggaggcttgggagtgtttggaagatttttctgctgtgcgtaacttgctggaacagagctctaacagtacctcttggttttggaggtttctgtggggctcctcccaggcaaagttagtctgcagaattaaggaggattacaagtgggaatttgaagagcttttgaaatcctgtggtgagctgtttgattctttgaatctgggtcaccaggcgcttttccaagagaaggtcatcaagactttggatttttccacaccggggcgcgctgcggctgctgttgcttttttgagttttataaaggataaatggagcgaagaaacccatctgagcggggggtacctgctggattttctggccatgcatctgtggagagcggtggtgagacacaagaatcgcctgctactgttgtcttccgtccgcccggcaataataccgacggaggagcaacagcaggaggaagccaggcggcggcggcggcaggagcagagcccatggaacccgagagccggcctggaccctcgggaatgaatgttgtacaggtggctgaactgtttccagaactgagacgcattttaaccattaacgaggatgggcaggggctaaagggggtaaagagggagcggggggcttctgaggctacagaggaggctaggaatctaacttttagcttaatgaccagacaccgtcctgagtgtgttacttttcagcagattaaggataattgcgctaatgagcttgatctgctggcgcagaagtattccataaagcagctgaccacttactggctgcagccaggggatgattttgaggaggctattagggtatatgcaaaggtggcacttaggccagattgcaagtacaagattagcaaacttgtaaatatcaggaattgttgctacatttctgggaacggggccgaggtggagatagatacggaggatagggtggcctttagatgtagcatgataaatatgtggccgggggtgcttggcatggacggggtggttattatgaatgtgaggtttactggtcccaattttagcggtacggttttcctggccaataccaatcttatcctacacggtgtaagcttctatgggtttaacaatacctgtgtggaagcctggaccgatgtaagggttcggggctgtgccttttactgctgctggaagggggtggtgtgtcgccccaaaagcagggcttcaattaagaaatgcctgtttgaaaggtgtaccttgggtatcctgtctgagggtaactccagggtgcgccacaatgtggcctccgactgtggttgctttatgctagtgaaaagcgtggctgtgattaagcataacatggtgtgtggcaactgcgaggacagggcctctcagatgctgacctgctcggacggcaactgtcacttgctgaagaccattcacgtagccagccactctcgcaaggcctggccagtgtttgagcacaacatactgacccgctgttccttgcatttgggtaacaggaggggggtgttcctaccttaccaatgcaatttgagtcacactaagatattgcttgagcccgagagcatgtccaaggtgaacctgaacggggtgtttgacatgaccatgaagatctggaaggtgctgaggtacgatgagacccgcaccaggtgcagaccctgcgagtgtggcggtaaacatattaggaaccagcctgtgatgctggatgtgaccgaggagctgaggcccgatcacttggtgctggcctgcacccgcgctgagtttggctctagcgatgaagatacagattgaggtactgaaatgtgtgggcgtggcttaagggtgggaaagaatatataaggtgggggtctcatgtagttttgtatctgttttgcagcagccgccgccatgagcgccaactcgtttgatggaagcattgtgagctcatatttgacaacgcgcatgcccccatgggccggggtgcgtcagaatgtgatgggctccagcattgatggtcgccccgtcctgcccgcaaactctactaccttgacctacgagaccgtgtctggaacgccgttggagactgcagcctccgccgccgcttcagccgctgcagccaccgcccgcgggattgtgactgactttgctttcctgagcccgcttgcaagcagtgcagcttcccgttcatccgcccgcgatgacaagttgacggctcttttggcacaattggattctttgacccgggaacttaatgtcgtttctcagcagctgttggatctgcgccagcaggtttctgccctgaaggcttcctcccctcccaatgcggtttaaaacataaataaaaaccagactctgtttggatttggatcaagcaagtgtcttgctgtctttatttaggggttttgcgcgcgcggtaggcccgggaccagcggtctcggtcgttgagggtcctgtgtattttttccaggacgtggtaaaggtgactctggatgttcagatacatgggcataagcccgtctctggggtggaggtagcaccactgcagagcttcatgctgcggggtggtgttgtagatgatccagtcgtagcaggagcgctgggcgtggtgcctaaaaatgtctttcagtagcaagctgattgccaggggcaggcccttggtgtaagtgtttacaaagcggttaagctgggatgggtgcatacgtggggatatgagatgcatcttggactgtatttttaggttggctatgttcccagccatatccctccggggattcatgttgtgcagaaccaccagcacagtgtatccggtgcacttgggaaatttgtcatgtagcttagaaggaaatgcgtggaagaacttggagacgcccttgtgacctccaagattttccatgcattcgtccataatgatggcaatgggcccacgggcggcggcctgggcgaagatatttctgggatcactaacgtcatagttgtgttccaggatgagatcgtcataggccatttttacaaagcgcgggcggagggtgccagactgcggtataatggttccatccggcccaggggcgtagttaccctcacagatttgcatttcccacgctttgagttcagatggggggatcatgtctacctgcggggcgatgaagaaaaccgtttccggggtaggggagatcagctgggaagaaagcaggttcctaagcagctgcgacttaccgcagccggtgggcccgtaaatcacacctattaccggctgcaactggtagttaagagagctgcagctgccgtcatccctgagcaggggggccacttcgttaagcatgtccctgacttgcatgttttccctgaccaaatccgccagaaggcgctcgccgcccagcgatagcagttcttgcaaggaagcaaagtttttcaacggtttgaggccgtccgccgtaggcatgcttttgagcgtttgaccaagcagttccaggcggtcccacagctcggtcacgtgctctacggcatctcgatccagcatatctcctcgtttcgcgggttggggcggctttcgctgtacggcagtagtcggtgctcgtccagacgggccagggtcatgtctttccacgggcgcagggtcctcgtcagcgtagtctgggtcacggtgaaggggtgcgctccgggttgcgcgctggccagggtgcgcttgaggctggtcctgctggtgctgaagcgctgccggtcttcgccctgcgcgtcggccaggtagcatttgaccatggtgtcatagtccagcccctccgcggcgtggcccttggcgcgcagcttgcccttggaggaggcgccgcacgaggggcagtgcagacttttaagggcgtagagcttgggcgcgagaaataccgattccggggagtaggcatccgcgccgcaggccccgcagacggtctcgcattccacgagccaggtgagctctggccgttcggggtcaaaaaccaggtttcccccatgctttttgatgcgtttcttacctctggtttccatgagccggtgtccacgctcggtgacgaaaaggctgtccgtgtccccgtatacagacttgagaggcctgtcctcgagcggtgttccgcggtcctcctcgtatagaaactcggaccactctgagacgaaggctcgcgtccaggccagcacgaaggaggctaagtgggaggggtagcggtcgttgtccactagggggtccactcgctccagggtgtgaagacacatgtcgccctcttcggcatcaaggaaggtgattggtttataggtgtaggccacgtgaccgggtgttcctgaaggggggctataaaagggggtgggggcgcgttcgtcctcactctcttccgcatcgctgtctgcgagggccagctgttggggtgagtactccctctcaaaagcgggcatgacttctgcgctaagattgtcagtttccaaaaacgaggaggatttgatattcacctggcccgcggtgatgcctttgagggtggccgcgtccatctggtcagaaaagacaatctttttgttgtcaagcttggtggcaaacgacccgtagagggcgttggacagcaacttggcgatggagcgcagggtttggtttttgtcgcgatcggcgcgctccttggccgcgatgtttagctgcacgtattcgcgcgcaacgcaccgccattcgggaaagacggtggtgcgctcgtcgggcactaggtgcacgcgccaaccgcggttgtgcagggtgacaaggtcaacgctggtggctacctctccgcgtaggcgctcgttggtccagcagaggcggccgcccttgcgcgagcagaatggcggtagtgggtctagctgcgtctcgtccggggggtctgcgtccacggtaaagaccccgggcagcaggcgcgcgtcgaagtagtctatcttgcatccttgcaagtctagcgcctgctgccatgcgcgggcggcaagcgcgcgctcgtatgggttgagtgggggaccccatggcatggggtgggtgagcgcggaggcgtacatgccgcaaatgtcgtaaacgtagaggggctctctgagtattccaagatatgtagggtagcatcttccaccgcggatgctggcgcgcacgtaatcgtatagttcgtgcgagggagcgaggaggtcgggaccgaggttgctacgggcgggctgctctgctcggaagactatctgcctgaagatggcatgtgagttggatgatatggttggacgctggaagacgttgaagctggcgtctgtgagacctaccgcgtcacgcacgaaggaggcgtaggagtcgcgcagcttgttgaccagctcggcggtgacctgcacgtctagggcgcagtagtccagggtttccttgatgatgtcatacttatcctgtcccttttttttccacagctcgcggttgaggacaaactcttcgcggtctttccagtactcttggatcggaaacccgtcggcctccgaacggtaagagcctancatgtagaactggttgacggcctggtaggcgcagcatcccttttctacgggtagcgcgtatgcctgcgcggccttccggagcgaggtgtgggtgagcgcaaaggtgtccctaaccatgactttgaggtactggtatttgaagtcagtgtcgtcgcatccgccctgctcccagagcaaaaagtccgtgcgctttttggaacgcgggtttggcagggcgaaggtgacatcgttgaagagtatctttcccgcgcgaggcataaagttgcgtgtgatgcggaagggtcccggcacctcggaacggttgttaattacctgggcggcgagcacgatctcgtcaaagccgttgatgttgtggcccacaatgtaaagttccaagaagcgcgggatgcccttgatggaaggcaattttttaagttcctcgtaggtgagctcttcaggggagctgagcccgtgctctgaaagggcccagtctgcaagatgagggttggaagcgacgaatgagctccacaggtcacgggccattagcatttgcaggtggtcgcgaaaggtcctaaactggcgacctatggccattttttctggggtgatgcagtagaaggtaagcgggtcttgttcccagcggtcccatccaaggtccgcggctaggtctcgcgcggcggtcactagaggctcatctccgccgaacttcatgaccagcatgaagggcacgagctgcttcccaaaggcccccatccaagtataggtctctacatcgtaggtgacaaagagacgctcggtgcgaggatgcgagccgatcgggaagaactggatctcccgccaccagttggaggagtggctgttgatgtggtgaaagtagaagtccctgcgacgggccgaacactcgtgctggcttttgtaaaaacgtgcgcagtactggcagcggtgcacgggctgtacatcctgcacgaggttgacctgacgaccgcgcacaaggaagcagagtgggaatttgagcccctcgcctggcgggtttggctggtggtcttctacttcggctgcttgtccttgaccgtctggctgctcgaggggagttacggtggatcggaccaccacgccgcgcgagcccaaagtccagatgtccgcgcgcggcggtcggagcttgatgacaacatcgcgcagatgggagctgtccatggtctggagctcccgcggcgtcaggtcaggcgggagctcctgcaggtttacctcgcatagccgggtcagggcgcgggctaggtccaggtgatacctgatttccaggggctggttggtggcggcgtcgatggcttgcaagaggccgcatccccgcggcgcgactacggtaccgcgcggcgggcggtgggccgcgggggtgtccttggatgatgcatctaaaagcggtgacgcgggcgggcccccggaggtagggggggctcgggacccgccgggagagggggcaggggcacgtcggcgccgcgcgcgggcaggagctggtgctgcgcgcggaggttgctggcgaacgcgacgacgcggcggttgatctcctgaatctggcgcctctgcgtgaagacgacgggcccggtgagcttgaacctgaaagagagttcgacagaatcaatttcggtgtcgttgacggcggcctggcgcaaaatctcctgcacgtctcctgagttgtcttgataggcgatctcggccatgaactgctcgatctcttcctcctggagatctccgcgtccggctcgctccacggtggcggcgaggtcgttggagatgcgggccatgagctgcgagaaggcgttgaggcctccctcgttccagacgcggctgtagaccacgcccccttcggcatcgcgggcgcgcatgaccacctgcgcgagattgagctccacgtgccgggcgaagacggcgtagtttcgcaggcgctgaaagaggtagttgagggtggtggcggtgtgttctgccacgaagaagtacataacccagcgccgcaacgtggattcgttgatatcccccaaggcctcaaggcgctccatggcctcgtagaagtccacggcgaagttgaaaaactgggagttgcgcgccgacacggttaactcctcctccagaagacggatgagctcggcgacagtgtcgcgcacctcgcgctcaaaggctacaggggcctcttcttcttcttcaatctcctcttccataagggcctccccttcttcttcttctggcggcggtgggggaggggggacacggcggcgacgacggcgcaccgggaggcggtcgacaaagcgctcgatcatctccccgcggcgacggcgcatggtctcggtgacggcgcggccgttctcgcgggggcgcagttggaagacgccgcccgtcatgtcccggttatgggttggcggggggctgccgtgcggcagggatacggcgctaacgatgcatctcaacaattgttgtgtaggtactccgccaccgagggacctgagcgagtccgcatcgaccggatcggaaaacctctcgagaaaggcgtctaaccagtcacagtcgcaaggtaggctgagcaccgtggcgggcggcagcgggcggcggtcggggttgtttctggcggaggtgctgctgatgatgtaattaaagtaggcggtcttgagacggcggatggtcgacagaagcaccatgtccttgggtccggcctgctgaatgcgcaggcggtcggccatgccccaggcttcgttttgacatcggcgcaggtctttgtagtagtcttgcatgagcctttctaccggcacttcttcttctccttcctcttgtcctgcatctcttgcatctatcgctgcggcggcggcggagtttggccgtaggtggcgccctcttcctcccatgcgtgtgaccccgaagcccctcatcggctgaagcagggccaggtcggcgacaacgcgctcggctaatatggcctgctgcacctgcgtgagggtagactggaagtcgtccatgtccacaaagcggtggtatgcgcccgtgttgatggtgtaagtgcagttggccataacggaccagttaacggtctggtgacccggctgcgagagctcggtgtacctgagacgcgagtaagcccttgagtcaaagacgtagtcgttgcaagtccgcaccaggtactggtatcccaccaaaaagtgcggcggcggctggcggtagaggggccagcgtagggtggccggggctccgggggcgaggtcttccaacataaggcgatgatatccgtagatgtacctggacatccaggtgatgccggcggcggtggtggaggcgcgcggaaagtcacggacgcggttccagatgttgcgcagcggcaaaaagtgctccatggtcgggacgctctggccggtcaggcgcgcgcagtcgttgacgctctagaccgtgcaaaaggagagcctgtaagcgggcactcttccgtggtctggtggataaattcgcaagggtatcatggcggacgaccggggttcgaaccccggatccggccgtccgccgtgatccatgcggttaccgcccgcgtgtcgaacccaggtgtgcgacgtcagacaacgggggagcgctccttttggcttccttccaggcgcggcggatgctgcgctagcttttttggccactggccgcgcgcggcgtaagcggttaggctggaaagcgaaagcattaagtggctcgctccctgtagccggagggttattttccaagggttgagtcgcgggacccccggttcgagtctcgggccggccggactgcggcgaacgggggtttgcctccccgtcatgcaagaccccgcttgcaaattcctccggaaacagggacgagccccttttttgcttttcccagatgcatccggtgctgcggcagatgcgcccccctcctcagcagcggcaagagcaagagcagcggcagacatgcagggcaccctcccctcctcctaccgcgtcaggaggggcgacatccgcggttgacgcggcagcagatggtgattacgaacccccgcggcgccgggcccggcactacctggacttggaggagggcgagggcctggcgcggctaggagcgccctctcctgagcggtacccaagggtgcagctgaagcgtgatacgcgtgaggcgtacgtgccgcggcagaacctgtttcgcgaccgcgagggagaggagcccgaggagatgcgggatcgaaagttccacgcagggcgcgagctgcggcatggcctgaatcgcgagcggttgctgcgcgaggaggactttgagcccgacgcgcgaaccgggattagtcccgcgcgcgcacacgtggcggccgccgacctggtaaccgcatacgagcagacggtgaaccaggagattaactttcaaaaaagctttaacaaccacgtgcgtacgcttgtggcgcgcgaggaggtggctataggactgatgcatctgtgggactttgtaagcgcgctggagcaaaacccaaatagcaagccgctcatggcgcagctgttccttatagtgcagcacagcagggacaacgaggcattcagggatgcgctgctaaacatagtagagcccgagggccgctggctgctcgatttgataaacatcctgcagagcatagtggtgcaggagcgcagcttgagcctggctgacaaggtggccgccatcaactattccatgcttagcctgggcaagttttacgcccgcaagatataccataccccttacgttcccatagacaaggaggtaaagatcgaggggttctacatgcgcatggcgctgaaggtgcttaccttgagcgacgacctgggcgtttatcgcaacgagcgcatccacaaggccgtgagcgtgagccggcggcgcgagctcagcgaccgcgagctgatgcacagcctgcaaagggccctggctggcacgggcagcggcgatagagaggccgagtcctactttgacgcgggcgctgacctgcgctgggccccaagccgacgcgccctggaggcagctggggccggacctgggctggcggtggcacccgcgcgcgctggcaacgtcggcggcgtggaggaatatgacgaggacgatgagtacgagccagaggacggcgagtactaagcggtgatgtttctgatcagtcgcggccgcgatatcgctagcgaagttcctattctctagaaagtataggaacttcggatcctctagagtcgaaaaaaaaaaagcatgatgcaaaataaaaaactcaccaaggccatggcaccgagcgttggttttcttgtattccccttagtatgcggcgcgcggcgatgtatgaggaaggtcctcctccctcctacgagagtgtggtgagcgcggcgccagtggcggcggcgctgggttctcccttcgatgctcccctggacccgccgtttgtgcctccgcggtacctgcggcctaccggggggagaaacagcatccgttactctgagttggcacccctattcgacaccacccgtgtgtacctggtggacaacaagtcaacggatgtggcatccctgaactaccagaacgaccacagcaactttctgaccacggtcattcaaaacaatgactacagcccgggggaggcaagcacacagaccatcaatcttgacgaccggtcgcactggggcggcgacctgaaaaccatcctgcataccaacatgccaaatgtgaacgagttcatgtttaccaataagtttaaggcgcgggtgatggtgtcgcgcttgcctactaaggacaatcaggtggagctgaaatacgagtgggtggagttcacgctgcccgagggcaactactccgagaccatgaccatagaccttatgaacaacgcgatcgtggagcactacttgaaagtgggcagacagaacggggttctggaaagcgacatcggggtaaagtttgacacccgcaacttcagactggggtttgaccccgtcactggtcttgtcatgcctggggtatatacaaacgaagccttccatccagacatcattttgctgccaggatgcggggtggacttcacccacagccgcctgagcaacttgttgggcatccgcaagcggcaacccttccaggagggctttaggatcacctacgatgatctggagggtggtaacattcccgcactgttggatgtggacgcctaccaggcgagcttgaaagatgacaccgaacagggcgggggtggcgcaggcggcagcaacagcagtggcagcggcgcggaagagaactccaacgcggcagccgcggcaatgcagccggtggaggacatgaacgatcatgccattcgcggcgacacctttgccacacgggctgaggagaagcgcgctgaggccgaagcagcggccgaagctgccgcccccgctgcgcaacccgaggtcgagaagcctcagaagaaaccggtgatcaaacccctgacagaggacagcaagaaacgcagttacaacctaataagcaatgacagcaccttcacccagtaccgcagctggtaccttgcatacaactacggcgaccctcagaccggaatccgctcatggaccctgctttgcactcctgacgtaacctgcggctcggagcaggtctactggtcgttgccagacatgatgcaagaccccgtgaccttccgctccacgcgccagatcagcaactttccggtggtgggcgccgagctgttgcccgtgcactccaagagcttctacaacgaccaggccgtctactcccaactcatccgccagtttacctctctgacccacgtgttcaatcgctttcccgagaaccagattttggcgcgcccgccagcccccaccatcaccaccgtcagtgaaaacgttcctgctctcacagatcacgggacgctaccgctgcgcaacagcatcggaggagtccagcgagtgaccattactgacgccagacgccgcacctgcccctacgtttacaaggccctgggcatagtctcgccgcgcgtcctatcgagccgcactttttgagcaagcatgtccatccttatatcgcccagcaataacacaggctggggcctgcgcttcccaagcaagatgtttggcggggccaagaagcgctccgaccaacacccagtgcgcgtgcgcgggcactaccgcgcgccctggggcgcgcacaaacgcggccgcactgggcgcaccaccgtcgatgacgccatcgacgcggtggtggaggaggcgcgcaactacacgcccacgccgccgccagtgtccaccgtggacgcggccattcagaccgtggtgcgcggagcccggcgctacgctaaaatgaagagacggcggaggcgcgtagcacgtcgccaccgccgccgacccggcactgccgcccaacgcgcggcggcggccctgcttaaccgcgcacgtcgcaccggccgacgggcggccatgcgagccgctcgaaggctggccgcgggtattgtcactgtgccccccaggtccaggcgacgagcggccgccgcagcagccgcggccattagtgttatgactcagggtcgcaggggcaacgtgtactgggtgcgcgactcggttagcggcctgcgcgtgcccgtgcgcacccgccccccgcgcaactagattgcaataaaaaactacttagactcgtactgttgtatgtatccagcggcggcggcgcgcatcgaagctatgtccaagcgcaaaatcaaagaagagatgctccaggtcatcgcgccggagatctatggccccccgaagaaggaagagcaggattacaagccccgaaagctaaagcgggtcaaaaagaaaaagaaagatgatgatgatgatgaacttgacgacgaggtggaactgttgcacgcgaccgcgcccaggcgacgggtacagtggaaaggtcgacgcgtaagacgtgttttgcgacccggcaccaccgtagtctttacgcccggtgagcgctccacccgcacctacaagcgcgtgtatgatgaggtgtacggcgacgaggacctgcttgagcaggccaacgagcgcctcggggagtttgcctacggaaagcggcataaggacatgctggcgttgccgctggacgagggcaacccaacacctagcctaaagcccgtgacactgcagcaggtgctgcccgcgcttgcaccgtccgaagaaaagcgcggcctaaagcgcgagtctggtgacttggcacccaccgtgcagctgatggtacccaagcgtcagcgactggaagatgtcttggaaaaaatgaccgtggagcctgggctggagcccgaggtccgcgtgcggccaatcaagcaggtggcaccgggactgggcgtgcagaccgtggacgttcagatacccaccaccagtagcactagtattgccactgccacagagggcatggagacacaaacgtccccggttgcctcggcggtggcagatgccgcggtgcaggcggccgctgcggccgcgtccaagacctctacggaggtgcaaacggacccgtggatgtttcgtgtttcagccccccggcgtccgcgccgttcaaggaagtacggcgccgccagcgcgctactgcccgaatatgccctacatccttccatcgcgcctacccccggctatcgtggctacacctaccgccccagaagacgagcaactacccgacgccgaaccaccactggaacccgccgccgccgtcgccgtcgccagcccgtgctggccccgatttccgtgcgcagggtggctcgcgaaggaggcaggaccctggtgctgccaacagcgcgctaccaccccagcatcgtttaaaagccggtctttgtggttcttgcagatatggccctcacctgccgcctccgtttcccggtgccgggattccgaggaagaatgcaccgtaggaggggcatggccggccacggcctgacgggcggcatgcgtcgtgcgcaccaccggcggcggcgcgcgtcgcaccgtcgcatgcgcgccggtatcctgcccctccttattccactgatcgccgcggcgattggcgccgtgcccggaattgcatccgtggccttgcaggcgcagagacactgattaaaaacaagttacatgtggaaaaatcaaaataaaagtctggactctcacgctcgcttggtcctgtaactattttgtagaatggaagacatcaactttgcgtcactggccccgcgacacggctcgcgcccgttcatgggaaactggcaagatatcggcaccagcaatatgagcggtggcgccttcagctggggctcgctgtggagcggcattaaaaatttcggttccgccgttaagaactatggcagcaaagcctggaacagcagcacaggccagatgctgagggacaagttgaaagagcaaaatttccaacaaaaggtggtagatggcctggcctctggcattagcggggtggtggacctggccaaccaggcagtgcaaaataagattaacagtaagcttgatccccgccctcccgtagaggagcctccaccggccgtggagacagtgtctccagaggggcgtggcgaaaagcgtccgcgacccgacagggaagaaactctggtgacgcaaatagacgagcctccctcgtacgaggaggcactaaagcaaggcctgcccaccacccgtcccatcgcgcccatggctaccggagtgctgggccagcacacacccgtaacgctggacctgcctccccccgccgacacccagcagaaacctgtgctgccaggcccgtccgccgttgttgtaacccgtcctagccgcgggtccctgcgccgcgccgccagcggtccgcgatcgttgcggcccgtagccagtggcaactggcaaagcacactgaacagcatcgtgggtctgggggtgcaatccctgaagcgccgacgatgcttctgatcgcggccgcgatatcgctagcgaattcgaagttcctattctctagaaagtataggaacttcggatcctctagagtcgatagctaacgtgtcgtatgtgtgtcatgtatgcgtccatgtcgccgccagaggagctgctgagccgccgcgcgcccgctttccaagatggctaccccttcgatgatgccgcagtggtcttacatgcacatctcgggccaggacgcctcggagtacctgagccccgggctggtgcagtttgcccgcgccaccgagacgtacttcagcctgaataacaagtttagaaaccccacggtggcgcctacgcacgacgtgaccacagaccggtcccagcgtttgacgctgcggttcatccctgtggaccgtgaggatactgcgtactcgtacaaggcgcggttcaccctagctgtgggtgataaccgtgtgctggacatggcttccacgtactttgacatccgcggcgtgctggacaggggccccacttttaagccctactccggcactgcctacaacgccctagctcccaagggtgcccccaactcatgcgagtgggatgaagatgatactcaggtacaggtagcggctgaagacgatcaagacgacgacgaagaagaggaacaactacctcagcagagaaatggcaaaaaaactcacgtatatgctcaggcaccgtttgctggcgaagcaattaacaaaaacggcctgcagataggaactaacggtgcagccactgaaggaaataaggaaatttacgcagataaaacttatcaacctgaaccacaaataggagaatcacagtggaacgaagccgaatcgtccgtagcaggtggaagggttcttaaaaagactactcccatgaaaccatgctatggctcctatgccagacctaccaattctaacggaggtcagggcgttatggttgaacaaaatggtaaattggaaagtcaagtagaaatgcaatttttttcaacttctgtaaatgctatgaacgaggcaaacgctattcaacctaaactagtgttgtatagtgaagatgtaaatatggaaaccccagacactcatctttcttataagcctggaaaaagtgatgataattctaaggcaatgttgggtcaacaatctatgccaaacagacccaattacatagctttcagggacaattttattggcctaatgtattacaacagcactggtaacatgggtgttcttgctggtcaggcatcacagctaaatgctgtcgtagatttgcaagacagaaacacagagctgtcctaccaacttttgcttgattctattggtgatcgaaccagatacttttccatgtggaatcaggctgtagacagctacgatccagatgttagaattatcgagaaccatggaactgaggatgaattgccaaattattgttttcctcttggcggaattggggtgacggacacctatcaagctattaaggctacaaatggaaatggaggcgccactacctgggctcaggacaatacttttgcagaacgaaatgaaataggggtgggaaataactttgccatggaaattaacctgaatgccaacctatggagaaatttcctttactccaatattgcgctgtacctgccagacaagctaaaatacaaccccaccaatgtggaaatatctgacaatcccaacacctacgactacatgaacaagcgagtggtggctcccgggctggtggattgctacattaaccttggggcgcgctggtctctggactacatggacaacgttaatccctttaaccaccaccgcaatgcgggcctgcgttaccgctccatgttgttgggaaacggccgctacgtgccctttcacattcaggtgccccaaaagttttttgccattaaaaacctcctcctcctgccaggctcatacacatatgaatggaacttcaggaaggatgttaacatggttctgcagagctctctgggaaacgaccttagagttgacggggctagcattaagtttgacagcatttgtctttacgccaccttcttccccatggcccacaacacggcctccacgctggaagccatgctcagaaatgacaccaacgaccagtcctttaatgactacctttccgccgccaacatgctatatcccatacccgccaacgccaccaacgtgcccatctccatcccatcgcgcaactgggcagcatttcgcggttgggccttcacacgcttgaagacaaaggaaaccccttccctgggatcaggctacgacccttactacacctactctggctccataccataccttgacggaaccttctatcttaatcacacctttaagaaggtggccattacttttgactcttctgttagctggccgggcaacgaccgcctgcttactcccaatgagtttgagattaagcgctcagttgacggggagggctataacgtagctcagtgcaacatgacaaaggactggttcctagtgcagatgttggccaactacaatattggctaccagggcttctacattccagaaagctacaaagaccgcatgtactcgttcttcagaaacttccagcccatgagccggcaagtggtggacgatactaaatacaaagattatcagcaggttggaattatccaccagcataacaactcaggcttcgtaggctacctcgctcccaccatgcgcgagggacaagcttaccccgctaatgttccctacccactaataggcaaaaccgcggttgatagtattacccagaaaaagtttctttgcgaccgcaccctgtggcgcatccccttctccagtaactttatgtccatgggtgcgctcacagacctgggccaaaaccttctctacgcaaactccgcccacgcgctagacatgacctttgaggtggatcccatggacgagcccacccttctttatgttttgtttgaagtctttgacgtggtccgtgtgcaccagccgcaccgcggcgtcatcgagaccgtgtacctgcgcacgcccttctcggccggcaacgccacaacataaagaagcaagcaacatcaacaacagctgccgccatgggctccagtgagcaggaactgaaagccattgtcaaagatcttggttgtgggccatattttttgggcacctatgacaagcgcttcccaggctttgtttccccacacaagctcgcctgcgccatagttaacacggccggtcgcgagactgggggcgtacactggatggcctttgcctggaacccgcgctcaaaaacatgctacctctttgagccctttggcttttctgaccaacgtctcaagcaggtttaccagtttgagtacgagtcactcctgcgccgtagcgccattgcctcttcccccgaccgctgtataacgctggaaaagtccacccaaagcgtgcaggggcccaactcggccgcctgtggcctattctgctgcatgtttctccacgcctttgccaactggccccaaactcccatggatcacaaccccaccatgaaccttattaccggggtacccaactccatgcttaacagtccccaggtacagcccaccctgcgccgcaaccaggaacagctctacagcttcctggagcgccactcgccctacttccgcagccacagtgcgcaaattaggagcgccacttctttttgtcacttgaaaaacatgtaaaaataatgtactaggagacactttcaataaaggcaaatgtttttatttgtacactctcgggtgattatttacccccacccttgccgtctgcgccgtttaaaaatcaaaggggttctgccgcgcatcgctatgcgccactggcagggacacgttgcgatactggtgtttagtgctccacttaaactcaggcacaaccatccgcggcagctcggtgaagttttcactccacaggctgcgcaccatcaccaacgcgtttagcaggtcgggcgccgatatcttgaagtcgcagttggggcctccgccctgcgcgcgcgagttgcgatacacagggttacagcactggaacactatcagcgccgggtggtgcacgctggccagcacgctcttgtcggagatcanatccgcgtccaggtcctccgcgttgctcagggcgaacggagtcaactttggtagctgccttcccaaaaagggtgcatgcccaggctttgagttgcactcgcaccgtagtggcatcagaaggtgaccgtgcccagtctgggcgttaggatacagcgcctgcatgaaagccttgatctgcttaaaagccacctgagcctttgcgccttcagagaagaacatgccgcaagacttgccggaaaactgattggccggacaggccgcgtcatgcacgcagcaccttgcgtcggtgttggagatctgcaccacatttcggccccaccggttcttcacgatcttggccttgctagactgctccttcagcgcgcgctgcccgttttcgctcgtcacatccatttcaatcacgtgctccttatttatcataatgctcccgtgtagacacttaagctcgccttcgatctcagcgcagcggtgcagccacaacgcgcagcccgtgggctcgtggtgcttgtaggttacctctgcaaacgactgcaggtacgcctgcaggaatcgccccatcatcgtcacaaaggtcttgttgctggtgaaggtcagctgcaacccgcggtgctcctcgtttagccaggtcttgcatacggccgccagagcttccacttggtcaggcagtagcttgaagtttgcctttagatcgttatccacgtggtacttgtccatcaacgcgcgcgcagcctccatgcccttctcccacgcagacacgatcggcaggctcagcgggtttatcaccgtgctttcactttccgcttcactggactcttccttttcctcttgcatccgcataccccgcgccactgggtcgtcttcattcagccgccgcaccgtgcgcttacctcccttgccgtgcttgattagcaccggtgggttgctgaaacccaccatttgtagcgccacatcttctctttcttcctcgctgtccacgatcacctctggggatggcgggcgctcgggcttgggagaggggcgcttctttttctttttggacgcaatggccaaatccgccgtcgaggtcgatggccgcgggctgggtgtgcgcggcaccagcgcatcttgtgacgagtcttcttcgtcctcggactcgagacgccgcctcagccgcttttttgggggcgcgcggggaggcggcggcgacggcgacggggacgagacgtcctccatggttggtggacgtcgcgccgcaccgcgtccgcgctcgggggtggtttcgcgctgctcctcttcccgactggccatttccttctcctataggcagaaaaagatcatggagtcagtcgagaaggaggacagcctaaccgccccctttgagttcgccaccaccgcctccaccgatgccgccaacgcgcctaccaccttccccgtcgaggcacccccgcttgaggaggaggaagtgattatcgagcaggacccaggttttgtaagcgaagacgacgaagatcgctcagtaccaacagaggataaaaagcaagaccaggacgacgcagaggcaaacgaggaacaagtcgggcggggggaccaaaggcatggcgactacctagatgtgggagacgacgtgctgttgaagcatctgcagcgccagtgcgccattatctgcgacgcgttgcaagagcgcagcgatgtgcccctcgccatagcggatgtcagccttgcctacgaacgccacctgttctcaccgcgcgtaccccccaaacgccaagaaaacggcacatgcgagcccaacccgcgcctcaacttctaccccgtatttgccgtgccagaggtgcttgccacctatcacatctttttccaaaactgcaagatacccctatcctgccgtgccaaccgcagccgagcggacaagcagctggccttgcggcagggcgctgtcatacctgatatcgcctcgctcgacgaagtgccaaaaatctttgagggtcttggacgcgacgagaagcgcgcggcaaacgctctgcaacaagaaaacagcgaaaatgaaagtcactgtggagtgctggtggaacttgagggtgacaacgcgcgcctagccgtgctgaaacgcagcatcgaggtcacccactttgcctacccggcacttaacctaccccccaaggttatgagcacagtcatgagcgagctgatcgtgcgccgtgcacgacccctggagagggatgcaaacttgcaagaacaaaccgaggagggcctacccgcagttggcgatgagcagctggcgcgctggcttgagacgcgcgagcctgccgacttggaggagcgacgcaagctaatgatggccgcagtgcttgttaccgtggagcttgagtgcatgcagcggttctttgctgacccggagatgcagcgcaagctagaggaaacgttgcactacacctttcgccagggctacgtgcgccaggcctgcaaaatttccaacgtggagctctgcaacctggtctcctaccttggaattttgcacgaaaaccgccttgggcaaaacgtgcttcattccacgctcaagggcgaggcgcgccgcgactacgtccgcgactgcgtttacttatttctgtgctacacctggcaaacggccatgggcgtgtggcagcagtgcctggaggagcgcaacctgaaggagctgcagaagctgctaaagcaaaacttgaaggacctatggacggccttcaacgagcgctccgtggccgcgcacctggcggacattatcttccccgaacgcctgcttaaaaccctgcaacagggtctgccagacttcaccagtcaaagcatgttgcaaaactttaggaactttatcctagagcgttcaggaattctgcccgccacctgctgtgcgcttcctagcgactttgtgcccattaagtaccgtgaatgccctccgccgctttggggtcactgctaccttntgcagctagccaactaccttgcctaccactccgacatcatggaagacgtgagcggtgacggcctactggagtgtcactgtcgctgcaacctatgcaccccgcaccgctccctggtctgcaattcacaactgcttagcgaaagtcaaattatcggtacctttgagctgcagggtccctcgcctgacgaaaagtccgcggctccggggttgaaactcactccggggctgtggacgtcggcttaccttcgcaaatttgtacctgaggactaccacgcccacgagattaggttctacgaagaccaatcccgcccgccaaatgcggagcttaccgcctgcgtcattacccagggccacatccttggccaattgcaagccattaacaaagcccgccaagagtttctgctacgaaagggacggggggtttacttggacccccagtccggcgaggagctcaacccaatccccccgccgccgcagccctatcagcagccgcgggcccttgcttcccaggatggcacccaaaaagaagctgcagctgccgccgccgccacccacggacgaggaggaatactgggacagtcaggcagaggaggttttggacgaggaggaggagatgatggaagactgggacagcctagacgaggaagcttccgaggccgaagaggtgtcagacgaaacaccgtcaccctcggtcgcattcccctcgccggcgccccagaaatcggcaaccgttcccagcattgctacaacctccgctcctcaggcgccgccggcactgcccgttcgccgacccaaccgtagatgggacaccactggaaccagggccggtaagtctaagcagccgccgccgttagcccaagagcaacaacagcgccaaggctaccgctcgtggcgcgtgcacaagaacgccatagttgcttgcttgcaagactgtgggggcaacatctccttcgcccgccgctttcttctctaccatcacggcgtggccttcccccgtaacatcctgcattactaccgtcatctctacagcccctactgcaccggcggcagcggcagcaacagcagcggccacgcagaagcaaaggcgaccggatagcaagactctgacaaagcccaagaaatccacagcggcggcagcagcaggaggaggagcactgcgtctggcgcccaacgaacccgtatcgacccgcgagcttagaaacaggatttttcccactctgtatgctatatttcaacagagcaggggccaagaacaagagctgaaaataaaaaacaggtctctgcgctccctcacccgcagctgcctgtatcacaaaagcgaagatcagcttcggcgcacgctggaagacgcggaggctctcttcagcaaatactgcgcgctgactcttaaggactagtttcgcgccctttctcaaatttaagcgcgaaaactacgtcatctccagcggccacacccggcgccagcacctgtcgtcagcgccattatgagcaaggaaattcccacgccctacatgtggagttaccagccacaaatgggacttgcggctggagctgcccaagactactcaacccgaataaactacatgagcgcgggaccccacatgatatcccgggtcaacggaatccgcgcccaccgaaaccgaattctcctcgaacaggcggctattaccaccacacctcgtaataaccttaatccccgtagttggcccgctgccctggtgtaccaggaaagtcccgctcccaccactgtggtacttcccagagacgcccaggccgaagttcagatgactaactcaggggcgcagcttgcgggcggctttcgtcacagggtgcggtcgcccgggcagggtataactcacctgaaaatcagagggcgaggtattcagctcaacgacgagtcggtgagctcctctcttggtctccgtccggacgggacatttcagatcggcggcgctggccgctcttcatttacgccccgtcaggcgatcctaactctgcagacctcgtcctcggagccgcgctccggaggcattggaactctacaatttattgaggagttcgtgccttcggtttacttcaaccccttttctggacctcccggccactacccggaccagtttattcccaactttgacgcggtaaaagactcggcggacggctacgactgacagatctgagctcgcggccgcgatatcgctagcgaagttcctattctctagaaagtataggaacttcgatcctctagagtcgacctgcaggcatgcaagcttggcactgcaataaattacttacttaaaatcagtcagcaaatctttgtccagcttattcagcatcacctcctttccctcctcccaactctggtatttcagcagccttttagctgcgaactttctccaaagtctaaatgggatgtcaaattcctcatgttcttgtccctccgcacccactatcttcatattgttgcagatgaaacgcgccagaccgtctgaagacaccttcaaccctgtgtacccatatgacacggaaaccggccctccaactgtgcctttccttacccctccctttgtgtcgccaaatgggttccaagaaagtccccccggagtgctttctttgcgtctttcagaacctttggttacctcacacggcatgcttgcgctaaaaatgggcagcggcctgtccctggatcaggcaggcaaccttacatcaaatacaatcactgtttctcaaccgctaaaaaaaacaaagtccaatataactttggaaacatccgcgccccttacagtcagctcaggcgccctaaccatggccacaacttcgcctttggtggtctctgacaacactcttaccatgcaatcacaagcaccgctaaccgtgcaagactcaaaacttagcattgctaccaaagagccacttacagtgttagatggaaaactggccctgcagacatcagcccccctctctgccactgataacaacgccctcactatcactgcctcacctcctcttactactgcaaatggtagtctggctgttaccatggaaaacccactttacaacaacaatggaaaacttgggctcaaaattggcggtcctttgcaagtggccaccgactcacatgcactaacactaggtactggtcagggggttgcagttcataacaatttgctacatacaaaagttacaggcgcaatagggtttgatacatctggcaacatggaacttaaaactggagatggcctctatgtggatagcgccggtcctaaccaaaaactacatattaatctaaataccacaaaaggccttgcttttgacaacaccgcaataacaattaacgctggaaaagggttggaatttgaaacagactcctcaaacggaaatcccataaaaacaaaaattggatcaggcatacaatataataccaatggagctatggttgcaaaacttggaacaggcctcagttttgacagctccggagccataacaatgggcagcataaacaatgacagacttactctttggacaacaccagacccatccccaaattgcagaattgcttcagataaagactgcaagctaactctggcgctaacaaaatgtggcagtcaaattttgggcactgtttcagctttggcagtatcaggtaatatggcctccatcaatggaactctaagcagtgtaaacttggttcttagatttgatgacaacggagtgcttatgtcaaattcatcactggacaaacagtattggaactttagaaacggggactccactaacggtcaaccatacacttatgctgttgggtttatgccaaacctaaaagcttacccaaaaactcaaagtaaaactgcaaaaagtaatattgttagccaggtgtatcttaatggtgacaagtctaaaccattgcattttactattacgctaaatggaacagatgaaaccaaccaagtaagcaaatactcaatatcattcagttggtcctggaacagtggacaatacactaatgacaaatttgccaccaattcctataccttctcctacattgcccaggaataaagaatcgtgaacctgttgcatgttatgtttcaacgtgtttatttttcaattcgtattagtcatcgctattaccatggtgatgcggttttggcagtacatcaatgggcgtggatagcggtttgactcacggggatttccaagtctccaccccattgacgtcaatgggagtttgttttggcaccaaaatcaacgggactttccaaaatgtcgtaacaactccgccccattgacgcaaatgggcggtaggcgtgtacggtgggaggtctatataagcagagctggtttagtgaaccgtcagatccgctagagatccaccatgtttgtctttctcgtgctgctgcccctcgtgagcagccagtgcgtcaatctgacaacaaggacccagctgccccccgcctacaccaactccttcacaagaggcgtgtattaccccgataaggtcttcagatccagcgtcctccacagcacccaagatttgtttctgcctttcttcagcaacgtgacatggttccacgccattcatgtcagcggcacaaacggcacaaagaggtttgacaaccccgtgctccccttcaacgacggcgtgtacttcgccagcacagagaaatccaatatcattaggggctggatcttcggcacaacactggattccaagacccagtctctgctcattgtgaataacgccaccaacgtggtgattaaggtctgtgagtttcagttctgcaacgacccctttctgggagtctactaccacaagaataataagagctggatggagtccgagtttagggtgtacagctccgccaacaactgtaccttcgaatacgtgtcccagcctttcctcatggatctggagggcaagcaaggcaatttcaaaaatctgagagagttcgtgttcaaaaacattgatggatacttcaaaatctacagcaagcatacccccattaatctggtgagggatctgccccaaggattctccgctctggaacctctggtggatctgcccattggcattaacatcacaagattccagaccctcctcgccctccatagatcctatctgacccccggcgactcctccagcggatggacagccggagctgccgcctactacgtgggctatctgcagccaagaacctttctgctgaagtacaacgagaacggcaccatcacagacgctgtcgattgcgctctcgaccctctgagcgagaccaaatgcacactgaagagcttcaccgtggaaaagggcatctatcagaccagcaacttcagagtgcagcctaccgagagcattgtgaggtttcccaacatcaccaatctgtgtcctttcggcgaggtctttaatgccacaaggttcgcttccgtgtatgcttggaataggaagaggatcagcaattgcgtcgccgactattccgtcctctataacagcgcctccttctccaccttcaaatgttatggcgtgtcccccaccaagctcaacgacctctgcttcaccaatgtgtacgctgactccttcgtcattaggggcgacgaggtgaggcaaattgcccccggccagaccggcaagattgctgattacaactacaaactgcccgacgattttaccggctgcgtgatcgcttggaactccaacaatctggactccaaagtgggcggaaactacaattacctctacagactctttagaaaaagcaatctgaagcccttcgagagagacatctccaccgaaatctaccaagccggaagcacaccttgcaatggcgtcgagggatttaactgctacttccctctgcagagctacggctttcaacctaccaacggcgtcggatatcaaccctatagggtggtcgtgctgagctttgaactgctgcatgctcccgccaccgtctgcggacctaagaagagcaccaatctcgtcaaaaacaagtgcgtgaacttcaacttcaatggactgaccggcaccggcgtgctgaccgagagcaataagaagtttctgcccttccagcagttcggaagggatattgccgataccacagatgctgtgagggacccccaaaccctcgagattctggatatcaccccttgcagcttcggaggagtgtccgtgatcacccccggaacaaacacctccaatcaagtggctgtgctgtaccaagacgtgaactgcacagaagtccccgtggccatccatgccgaccagctgacccctacatggagagtgtactccaccggcagcaatgtgttccagacaagagccggatgcctcattggagctgaacacgtcaacaacagctacgagtgcgacattcccatcggcgccggcatttgtgcctcctatcagacccagaccaacagcccaagaagggctagaagcgtcgcttcccaatccatcattgcctacaccatgtctctgggagccgaaaactccgtcgcctactccaacaatagcatcgccatccccaccaattttaccatctccgtgaccacagagattctgcccgtgtccatgacaaagacatccgtggactgcaccatgtacatctgtggcgacagcaccgagtgtagcaatctgctgctgcaatatggcagcttctgcacccagctgaacagagccctcaccggcatcgccgtcgaacaagacaagaacacccaagaggtgttcgcccaagtgaagcaaatctacaagaccccccctatcaaagatttcggaggattcaactttagccagattctgcccgatcctagcaagccttccaagaggagcttcatcgaggatctgctgtttaataaggtgacactggccgacgctggcttcattaaacagtacggcgattgtctgggcgacatcgctgctagggatctgatctgcgctcagaagttcaacggactgacagtcctccctcctctgctgaccgacgagatgatcgctcagtataccagcgctctgctggctggaaccattaccagcggctggacattcggcgctggagccgccctccaaattccctttgccatgcagatggcctatagattcaacggcattggcgtcacccaaaatgtgctgtatgaaaatcagaagctgattgctaaccaattcaatagcgccattggcaagatccaagactctctgagctccacagccagcgccctcggaaagctgcaagacgtggtgaatcaaaacgcccaagctctgaacacactggtgaaacagctcagcagcaactttggagccatcagcagcgtgctcaatgatatcctctctaggctggaccctccggaggccgaagtccagatcgatagactcatcaccggcagactccaatctctgcagacatacgtcacccaacagctcattagagctgccgaaatcagagcctccgccaatctggccgccaccaagatgtccgagtgcgtgctgggacagagcaagagagtggacttctgtggcaagggataccatctgatgagcttcccccagagcgctccccatggagtggtctttctgcatgtcacatacgtgcccgcccaagagaagaacttcaccaccgctcccgccatttgccacgatggaaaggcccactttcccagagaaggagtgttcgtgagcaacggcacacactggtttgtcacccagagaaatttttacgagccccagattatcaccaccgacaacaccttcgtgtccggaaactgcgatgtcgtgattggcatcgtgaacaacacagtctacgaccctctgcagcccgaactcgacagcttcaaggaagagctggacaagtacttcaagaatcacacatcccccgacgtggatctgggcgacattagcggcattaatgcctccgtcgtcaacattcagaaggagattgatagactgaatgaagtcgccaagaacctcaatgagtctctgattgatctgcaagagctgggcaagtacgagcaatacatcaaatggccttggtacatctggctgggattcatcgctggactcatcgccatcgtgatggtcaccattatgctgtgttgcatgaccagctgctgcagctgtctgaagggctgctgcagctgcggaagctgctgcaagtttgacgaagacgactccgagcccgtgctgaagggcgtcaagctgcattatacataaactagtgctggaattcgcccttatagagtgctggaattcgcccttatagagtgctggaattcgcccttatatctagtaacggccgccagtgtgctggaattcgcccttataacttcgtatagcatacattatacgaagttataagggcgaattctgcagatatccatcctttaaaaaacctcccacacctccccctgaacctgaaacataaaatgaatgcaattgttgttgttaacttgtttattgcagcttataatggttacaaataaagcaatagcatcacaaatttcacaaataaagcatttttttcactgcattctagttgtggtttgtccaaactcatcaatgtatcttaacaacgtgtttatttttcaattgcagaaagaattgcagaaaatttcaagtcatttttcattcagtagtatagccccaccaccacatagcttatactaatcaccgtaccttaatcaaactcacagaaccctagtattcaacctgccacctccctcccaacacacagagtacacagtcctttctccccggctggccttaaacagcatcatatcatgggtaacagacatattcttaggtgttatattccacacggtctcctgtcgagccaaacgctcatcagtgatgttaataaactccccgggcagctcgcttaagttcatgtcgctgtccagctgctgagccacaggctgctgtccaacttgcggttgctcaacgggcggcgaaggagaagtccacgcctacatgggggtagagtcataatcgtgcatcaggatagggcggtggtgctgcagcagcgcgcgaataaactgctgccgccgccgctccgtcctgcaggaatacaacatggcagtggtctcctcagcgatgattcgcaccgcccgcagcataaggcgccttgtcctccgggcacagcagcgcaccctgatctcacttaagtcagcacagtaactgcagcacagtaccacaatattgtttaaaatcccacagtgcaaggcgctgtatccaaagctcatggcggggaccacagaacccacgtggccatcataccacaagcgcaggtagattaagtggcgacccctcataaacacgctggacataaacattacctcttttggcatgttgtaattcaccacctcccggtaccatataaacctctgattaaacatggcgccatccaccaccatcctaaaccagctggccaaaacctgcccgccggctatgcactgcagggaaccgggactggaacaatgacagtggagagcccaggactcgtaaccatggatcatcatgctcgtcatgatatcaatgttggcacaacacaggcacacgtgcatacacttcctcaggattacaagctcctcccgcgtcagaaccatatcccagggaacaacccattcctgaatcagcgtaaatcccacactgcagggaagacctcgcacgtaactcacgttgtgcattgtcaaagtgttacattcgggcagcagcggatgatcctccagtatggtagcgcgtgtctctgtctcaaaaggaggtaggcgatccctactgtacggagtgcgccgagacaaccgagatcgtgttggtcgtagtgtcatgccaaatggaacgccggacgtagtcatatttcctgaagcaaaaccaggtgcgggcgtgacaaacagatctgcgtctccggtctcgtcgcttagctcgctctgtgtagtagttgtagtatatccactctctcaaagcatccaggcgccccctggcttcgggttctatgtaaactccttcatgcgccgctgccctgataacatccaccaccgcagaataagccacacccagccaacctacacattcgttctgcgagtcacacacgggaggagcgggaagagctggaagaaccatgttttttttttttattccaaaagattatccaaaacctcaaaatgaagatctattaagtgaacgcgctcccctccggtggcgtggtcaaactctacagccaaagaacagataatggcatttgtaagatgttgcacaatggcttccaaaaggcaaactgccctcacgtccaagtggacgtaaaggctaaacccttcanggtgaatctcctctataaacattccagcaccttcaaccatgcccaaataattttcatctcgccaccttatcaatatgtctctaagcaaatcccgaatattaagtccggccattgtaaaaatctgctccagagcgccctccaccttcagcctcaagcagcgaatcatgattgcaaaaattcaggttcctcacagacctgtataagattcaaaagcggaacattaacaaaaataccgcgatcccgtaggtcccttcgcagggccagctgaacataatcgtgcaggtctgcacggaccagcgcggccacttccccgccaggaaccatgacaaaagaacccacactgattatgacacgcatactcggagctatgctaaccagcgtagccccgatgtaagcttgttgcatgggcggcgatataaaatgcaaggtactgctcaaaaaatcaggcaaagcctcgcgcaaaaaagcaagcacatcgtagtcatgctcatgcagataaaggcaggtaagttccggaaccaccacagaaaaagacaccatttttctctcaaacatgtctgcgggttcctgcataaacacaaaataaaataacaaaaaaaaaaaaacatttaaacattagaagcctgtcttacaacaggaaaaacaacccttataagcataagacggactacggccatgccggcgtgaccgtaaaaaaactggtcaccgtgattaaaaagcaccaccgacagttcctcggtcatgtccggagtcataatgtaagactcggtaaacacatcaggttggttaacatcggtcagtgctaaaaagcgaccgaaatagcccgggggaatacatacccgcaggcgtagagacaacattacagcccccataggaggtataacaaaattaataggagagaaaaacacataaacccctgaaaaaccctcctgcccctaggcaaaatagcaccctcccgctccagaacaacatacagcgcttccacagcggcagccataacagtcagccttaccagtaaaaaaacctattaaaaaacaccactcgacacggcaccagctcaatcagtcacagtgtaaaaagggccaagtacagagcgagtatatataggactaaaaaatgacgtaacggttaaagtccacaaaaaccacccagaaaaccgcacgcgaacctacgcccagaaacgaaagccaaaaaacccacaacttcctcaaatcttcacttccgttttcccacgatacgtcacttcccattttaaaaaaaaactacaattcccaatacatgcaagttactccgccctaaaacctacgtcacccgccccgttcccacgccccgcgccacgtcacaaactccaccccctcattatcatattggcttcaatccaaaataaggtatattattgatgatggcgat

SEQ ID NO: 38 - DNA, 35720 bp, Artificial
  nucleic acid sequence of SC-Ad-F-C68-(delta)IIIF-(delta)E3-Spike-3X-L
  misc_feature (7190)..(7190): n is a, c, g, or t
  misc_feature (21086)..(21086): n is a, c, g, or t
  misc_feature (24022)..(24022): n is a, c, g, or t
  misc_feature (34310)..(34310): n is a, c, g, or t
cgccatcatcaataatataccttattttggattgaagccaatatgataatgagggggtggagtttgtgacgtggcgcggggcgtgggaacggggcgggtgacgtagtagtgtggcggaagtgtgatgttgtaagtgtggcggaacacatgtaagcgccggatgtggtaaaagtgacgtttttggtgtgcgccggtgtacacgggaagtgacaattttcgcgcggttttaggcggatgttgtagtaaatttgggcgtaaccaagtaatatttggccattttcgcgggaaaactgaataagaggaagtgaaatctgaataattctgtgttactcatagcgcgtaatatttgtctagggccgcggggactttgaccgtttacgtggagactcgcccaggtgtttttctcaggtgttttccgcgttccgggtcaaagttggcgttttattattatagtcagctgacgcgcagtgtatttatacccggtgagttcctcaagaggccactcttgagtgccagcgagtagagttttctcctccgagccgctccgacaccgggactgaaaatgagacatattatctgccacggaggtgttattaccgaagaaatggccgccagtcttttggaccagctgatcgaagaggtactggctgataatcttccacctcctagccattttgaaccacctacccttcacgaactgtatgatttagacgtgacggcccccgaagatcccaacgaggaggcggtttcgcagatttttcccgagtctgtaatgttggcggtgcaggaagggattgacttattcacttttccgccggcgcccggttctccggagccgcctcacctttcccggcagcccgagcagccggagcagagagccttgggtccggtttctatgccaaaccttgtgccggaggtgatcgatcttacctgccacgaggctggctttccacccagtgacgacgaggatgaagagggtgaggagtttgtgttagattatgtggagcaccccgggcacggttgcaggtcttgtcattatcaccggaggaatacgggggacccagatattatgtgttcgctttgctatatgaggacctgtggcatgtttgtctacagtaagtgaaaaattatgggcagtgggtgatagagtggtgggtttggtgtggtaattttttttttaatttttacagttttgtggtttaaagaattttgtattgtgattttttaaaaggtcctgtgtctgaacctgagcctgagcccgagccagaaccggagcctgcaagacctacccggcgtcctaaattggtgcctgctatcctgagacgcccgacatcacctgtgtctagagaatgcaatagtagtacggatagctgtgactccggtccttctaacacacctcctgagatacacccggtggtcccgctgtgccccattaaaccagttgccgtgagagttggtgggcgtcgccaggctgtggaatgtatcgaggacttgcttaacgagtctgggcaacctttggacttgagctgtaaacgccccaggccataaggtgtaaacctgtgattgcgtgtgtggttaacgcctttgtttgctgaatgagttgatgtaagtttaataaagggtgagataatgtttaacttgcatggcgtgttaaatggggcggggcttaaagggtatataatgcgccgtgggctaatcttggttacatctgacctcatggaggcttgggagtgtttggaagatttttctgctgtgcgtaacttgctggaacagagctctaacagtacctcttggttttggaggtttctgtggggctcctcccaggcaaagttagtctgcagaattaaggaggattacaagtgggaatttgaagagcttttgaaatcctgtggtgagctgtttgattctttgaatctgggtcaccaggcgcttttccaagagaaggtcatcaagactttggatttttccacaccggggcgcgctgcggctgctgttgcttttttgagttttataaaggataaatggagcgaagaaacccatctgagcggggggtacctgctggattttctggccatgcatctgtggagagcggtggtgagacacaagaatcgcctgctactgttgtcttccgtccgcccggcaataataccgacggaggagcaacagcaggaggaagccaggcggcggcggcggcaggagcagagcccatggaacccgagagccggcctggaccctcgggaatgaatgttgtacaggtggctgaactgtttccagaactgagacgcattttaaccattaacgaggatgggcaggggctaaagggggtaaagagggagcggggggcttctgaggctacagaggaggctaggaatctaacttttagcttaatgaccagacaccgtcctgagtgtgttacttttcagcagattaaggataattgcgctaatgagcttgatctgctggcgcagaagtattccataaagcagctgaccacttactggctgcagccaggggatgattttgaggaggctattagggtatatgcaaaggtggcacttaggccagattgcaagtacaagattagcaaacttgtaaatatcaggaattgttgctacatttctgggaacggggccgaggtggagatagatacggaggatagggtggcctttagatgtagcatgataaatatgtggccgggggtgcttggcatggacggggtggttattatgaatgtgaggtttactggtcccaattttagcggtacggttttcctggccaataccaatcttatcctacacggtgtaagcttctatgggtttaacaatacctgtgtggaagcctggaccgatgtaagggttcggggctgtgccttttactgctgctggaagggggtggtgtgtcgccccaaaagcagggcttcaattaagaaatgcctgtttgaaaggtgtaccttgggtatcctgtctgagggtaactccagggtgcgccacaatgtggcctccgactgtggttgctttatgctagtgaaaagcgtggctgtgattaagcataacatggtgtgtggcaactgcgaggacagggcctctcagatgctgacctgctcggacggcaactgtcacttgctgaagaccattcacgtagccagccactctcgcaaggcctggccagtgtttgagcacaacatactgacccgctgttccttgcatttgggtaacaggaggggggtgttcctaccttaccaatgcaatttgagtcacactaagatattgcttgagcccgagagcatgtccaaggtgaacctgaacggggtgtttgacatgaccatgaagatctggaaggtgctgaggtacgatgagacccgcaccaggtgcagaccctgcgagtgtggcggtaaacatattaggaaccagcctgtgatgctggatgtgaccgaggagctgaggcccgatcacttggtgctggcctgcacccgcgctgagtttggctctagcgatgaagatacagattgaggtactgaaatgtgtgggcgtggcttaagggtgggaaagaatatataaggtgggggtctcatgtagttttgtatctgttttgcagcagccgccgccatgagcgccaactcgtttgatggaagcattgtgagctcatatttgacaacgcgcatgcccccatgggccggggtgcgtcagaatgtgatgggctccagcattgatggtcgccccgtcctgcccgcaaactctactaccttgacctacgagaccgtgtctggaacgccgttggagactgcagcctccgccgccgcttcagccgctgcagccaccgcccgcgggattgtgactgactttgctttcctgagcccgcttgcaagcagtgcagcttcccgttcatccgcccgcgatgacaagttgacggctcttttggcacaattggattctttgacccgggaacttaatgtcgtttctcagcagctgttggatctgcgccagcaggtttctgccctgaaggcttcctcccctcccaatgcggtttaaaacataaataaaaaccagactctgtttggatttggatcaagcaagtgtcttgctgtctttatttaggggttttgcgcgcgcggtaggcccgggaccagcggtctcggtcgttgagggtcctgtgtattttttccaggacgtggtaaaggtgactctggatgttcagatacatgggcataagcccgtctctggggtggaggtagcaccactgcagagcttcatgctgcggggtggtgttgtagatgatccagtcgtagcaggagcgctgggcgtggtgcctaaaaatgtctttcagtagcaagctgattgccaggggcaggcccttggtgtaagtgtttacaaagcggttaagctgggatgggtgcatacgtggggatatgagatgcatcttggactgtatttttaggttggctatgttcccagccatatccctccggggattcatgttgtgcagaaccaccagcacagtgtatccggtgcacttgggaaatttgtcatgtagcttagaaggaaatgcgtggaagaacttggagacgcccttgtgacctccaagattttccatgcattcgtccataatgatggcaatgggcccacgggcggcggcctgggcgaagatatttctgggatcactaacgtcatagttgtgttccaggatgagatcgtcataggccatttttacaaagcgcgggcggagggtgccagactgcggtataatggttccatccggcccaggggcgtagttaccctcacagatttgcatttcccacgctttgagttcagatggggggatcatgtctacctgcggggcgatgaagaaaaccgtttccggggtaggggagatcagctgggaagaaagcaggttcctaagcagctgcgacttaccgcagccggtgggcccgtaaatcacacctattaccggctgcaactggtagttaagagagctgcagctgccgtcatccctgagcaggggggccacttcgttaagcatgtccctgacttgcatgttttccctgaccaaatccgccagaaggcgctcgccgcccagcgatagcagttcttgcaaggaagcaaagtttttcaacggtttgaggccgtccgccgtaggcatgcttttgagcgtttgaccaagcagttccaggcggtcccacagctcggtcacgtgctctacggcatctcgatccagcatatctcctcgtttcgcgggttggggcggctttcgctgtacggcagtagtcggtgctcgtccagacgggccagggtcatgtctttccacgggcgcagggtcctcgtcagcgtagtctgggtcacggtgaaggggtgcgctccgggttgcgcgctggccagggtgcgcttgaggctggtcctgctggtgctgaagcgctgccggtcttcgccctgcgcgtcggccaggtagcatttgaccatggtgtcatagtccagcccctccgcggcgtggcccttggcgcgcagcttgcccttggaggaggcgccgcacgaggggcagtgcagacttttaagggcgtagagcttgggcgcgagaaataccgattccggggagtaggcatccgcgccgcaggccccgcagacggtctcgcattccacgagccaggtgagctctggccgttcggggtcaaaaaccaggtttcccccatgctttttgatgcgtttcttacctctggtttccatgagccggtgtccacgctcggtgacgaaaaggctgtccgtgtccccgtatacagacttgagaggcctgtcctcgagcggtgttccgcggtcctcctcgtatagaaactcggaccactctgagacgaaggctcgcgtccaggccagcacgaaggaggctaagtgggaggggtagcggtcgttgtccactagggggtccactcgctccagggtgtgaagacacatgtcgccctcttcggcatcaaggaaggtgattggtttataggtgtaggccacgtgaccgggtgttcctgaaggggggctataaaagggggtgggggcgcgttcgtcctcactctcttccgcatcgctgtctgcgagggccagctgttggggtgagtactccctctcaaaagcgggcatgacttctgcgctaagattgtcagtttccaaaaacgaggaggatttgatattcacctggcccgcggtgatgcctttgagggtggccgcgtccatctggtcagaaaagacaatctttttgttgtcaagcttggtggcaaacgacccgtagagggcgttggacagcaacttggcgatggagcgcagggtttggtttttgtcgcgatcggcgcgctccttggccgcgatgtttagctgcacgtattcgcgcgcaacgcaccgccattcgggaaagacggtggtgcgctcgtcgggcactaggtgcacgcgccaaccgcggttgtgcagggtgacaaggtcaacgctggtggctacctctccgcgtaggcgctcgttggtccagcagaggcggccgcccttgcgcgagcagaatggcggtagtgggtctagctgcgtctcgtccggggggtctgcgtccacggtaaagaccccgggcagcaggcgcgcgtcgaagtagtctatcttgcatccttgcaagtctagcgcctgctgccatgcgcgggcggcaagcgcgcgctcgtatgggttgagtgggggaccccatggcatggggtgggtgagcgcggaggcgtacatgccgcaaatgtcgtaaacgtagaggggctctctgagtattccaagatatgtagggtagcatcttccaccgcggatgctggcgcgcacgtaatcgtatagttcgtgcgagggagcgaggaggtcgggaccgaggttgctacgggcgggctgctctgctcggaagactatctgcctgaagatggcatgtgagttggatgatatggttggacgctggaagacgttgaagctggcgtctgtgagacctaccgcgtcacgcacgaaggaggcgtaggagtcgcgcagcttgttgaccagctcggcggtgacctgcacgtctagggcgcagtagtccagggtttccttgatgatgtcatacttatcctgtcccttttttttccacagctcgcggttgaggacaaactcttcgcggtctttccagtactcttggatcggaaacccgtcggcctccgaacggtaagagcctancatgtagaactggttgacggcctggtaggcgcagcatcccttttctacgggtagcgcgtatgcctgcgcggccttccggagcgaggtgtgggtgagcgcaaaggtgtccctaaccatgactttgaggtactggtatttgaagtcagtgtcgtcgcatccgccctgctcccagagcaaaaagtccgtgcgctttttggaacgcgggtttggcagggcgaaggtgacatcgttgaagagtatctttcccgcgcgaggcataaagttgcgtgtgatgcggaagggtcccggcacctcggaacggttgttaattacctgggcggcgagcacgatctcgtcaaagccgttgatgttgtggcccacaatgtaaagttccaagaagcgcgggatgcccttgatggaaggcaattttttaagttcctcgtaggtgagctcttcaggggagctgagcccgtgctctgaaagggcccagtctgcaagatgagggttggaagcgacgaatgagctccacaggtcacgggccattagcatttgcaggtggtcgcgaaaggtcctaaactggcgacctatggccattttttctggggtgatgcagtagaaggtaagcgggtcttgttcccagcggtcccatccaaggtccgcggctaggtctcgcgcggcggtcactagaggctcatctccgccgaacttcatgaccagcatgaagggcacgagctgcttcccaaaggcccccatccaagtataggtctctacatcgtaggtgacaaagagacgctcggtgcgaggatgcgagccgatcgggaagaactggatctcccgccaccagttggaggagtggctgttgatgtggtgaaagtagaagtccctgcgacgggccgaacactcgtgctggcttttgtaaaaacgtgcgcagtactggcagcggtgcacgggctgtacatcctgcacgaggttgacctgacgaccgcgcacaaggaagcagagtgggaatttgagcccctcgcctggcgggtttggctggtggtcttctacttcggctgcttgtccttgaccgtctggctgctcgaggggagttacggtggatcggaccaccacgccgcgcgagcccaaagtccagatgtccgcgcgcggcggtcggagcttgatgacaacatcgcgcagatgggagctgtccatggtctggagctcccgcggcgtcaggtcaggcgggagctcctgcaggtttacctcgcatagccgggtcagggcgcgggctaggtccaggtgatacctgatttccaggggctggttggtggcggcgtcgatggcttgcaagaggccgcatccccgcggcgcgactacggtaccgcgcggcgggcggtgggccgcgggggtgtccttggatgatgcatctaaaagcggtgacgcgggcgggcccccggaggtagggggggctcgggacccgccgggagagggggcaggggcacgtcggcgccgcgcgcgggcaggagctggtgctgcgcgcggaggttgctggcgaacgcgacgacgcggcggttgatctcctgaatctggcgcctctgcgtgaagacgacgggcccggtgagcttgaacctgaaagagagttcgacagaatcaatttcggtgtcgttgacggcggcctggcgcaaaatctcctgcacgtctcctgagttgtcttgataggcgatctcggccatgaactgctcgatctcttcctcctggagatctccgcgtccggctcgctccacggtggcggcgaggtcgttggagatgcgggccatgagctgcgagaaggcgttgaggcctccctcgttccagacgcggctgtagaccacgcccccttcggcatcgcgggcgcgcatgaccacctgcgcgagattgagctccacgtgccgggcgaagacggcgtagtttcgcaggcgctgaaagaggtagttgagggtggtggcggtgtgttctgccacgaagaagtacataacccagcgccgcaacgtggattcgttgatatcccccaaggcctcaaggcgctccatggcctcgtagaagtccacggcgaagttgaaaaactgggagttgcgcgccgacacggttaactcctcctccagaagacggatgagctcggcgacagtgtcgcgcacctcgcgctcaaaggctacaggggcctcttcttcttcttcaatctcctcttccataagggcctccccttcttcttcttctggcggcggtgggggaggggggacacggcggcgacgacggcgcaccgggaggcggtcgacaaagcgctcgatcatctccccgcggcgacggcgcatggtctcggtgacggcgcggccgttctcgcgggggcgcagttggaagacgccgcccgtcatgtcccggttatgggttggcggggggctgccgtgcggcagggatacggcgctaacgatgcatctcaacaattgttgtgtaggtactccgccaccgagggacctgagcgagtccgcatcgaccggatcggaaaacctctcgagaaaggcgtctaaccagtcacagtcgcaaggtaggctgagcaccgtggcgggcggcagcgggcggcggtcggggttgtttctggcggaggtgctgctgatgatgtaattaaagtaggcggtcttgagacggcggatggtcgacagaagcaccatgtccttgggtccggcctgctgaatgcgcaggcggtcggccatgccccaggcttcgttttgacatcggcgcaggtctttgtagtagtcttgcatgagcctttctaccggcacttcttcttctccttcctcttgtcctgcatctcttgcatctatcgctgcggcggcggcggagtttggccgtaggtggcgccctcttcctcccatgcgtgtgaccccgaagcccctcatcggctgaagcagggccaggtcggcgacaacgcgctcggctaatatggcctgctgcacctgcgtgagggtagactggaagtcgtccatgtccacaaagcggtggtatgcgcccgtgttgatggtgtaagtgcagttggccataacggaccagttaacggtctggtgacccggctgcgagagctcggtgtacctgagacgcgagtaagcccttgagtcaaagacgtagtcgttgcaagtccgcaccaggtactggtatcccaccaaaaagtgcggcggcggctggcggtagaggggccagcgtagggtggccggggctccgggggcgaggtcttccaacataaggcgatgatatccgtagatgtacctggacatccaggtgatgccggcggcggtggtggaggcgcgcggaaagtcacggacgcggttccagatgttgcgcagcggcaaaaagtgctccatggtcgggacgctctggccggtcaggcgcgcgcagtcgttgacgctctagaccgtgcaaaaggagagcctgtaagcgggcactcttccgtggtctggtggataaattcgcaagggtatcatggcggacgaccggggttcgaaccccggatccggccgtccgccgtgatccatgcggttaccgcccgcgtgtcgaacccaggtgtgcgacgtcagacaacgggggagcgctccttttggcttccttccaggcgcggcggatgctgcgctagcttttttggccactggccgcgcgcggcgtaagcggttaggctggaaagcgaaagcattaagtggctcgctccctgtagccggagggttattttccaagggttgagtcgcgggacccccggttcgagtctcgggccggccggactgcggcgaacgggggtttgcctccccgtcatgcaagaccccgcttgcaaattcctccggaaacagggacgagccccttttttgcttttcccagatgcatccggtgctgcggcagatgcgcccccctcctcagcagcggcaagagcaagagcagcggcagacatgcagggcaccctcccctcctcctaccgcgtcaggaggggcgacatccgcggttgacgcggcagcagatggtgattacgaacccccgcggcgccgggcccggcactacctggacttggaggagggcgagggcctggcgcggctaggagcgccctctcctgagcggtacccaagggtgcagctgaagcgtgatacgcgtgaggcgtacgtgccgcggcagaacctgtttcgcgaccgcgagggagaggagcccgaggagatgcgggatcgaaagttccacgcagggcgcgagctgcggcatggcctgaatcgcgagcggttgctgcgcgaggaggactttgagcccgacgcgcgaaccgggattagtcccgcgcgcgcacacgtggcggccgccgacctggtaaccgcatacgagcagacggtgaaccaggagattaactttcaaaaaagctttaacaaccacgtgcgtacgcttgtggcgcgcgaggaggtggctataggactgatgcatctgtgggactttgtaagcgcgctggagcaaaacccaaatagcaagccgctcatggcgcagctgttccttatagtgcagcacagcagggacaacgaggcattcagggatgcgctgctaaacatagtagagcccgagggccgctggctgctcgatttgataaacatcctgcagagcatagtggtgcaggagcgcagcttgagcctggctgacaaggtggccgccatcaactattccatgcttagcctgggcaagttttacgcccgcaagatataccataccccttacgttcccatagacaaggaggtaaagatcgaggggttctacatgcgcatggcgctgaaggtgcttaccttgagcgacgacctgggcgtttatcgcaacgagcgcatccacaaggccgtgagcgtgagccggcggcgcgagctcagcgaccgcgagctgatgcacagcctgcaaagggccctggctggcacgggcagcggcgatagagaggccgagtcctactttgacgcgggcgctgacctgcgctgggccccaagccgacgcgccctggaggcagctggggccggacctgggctggcggtggcacccgcgcgcgctggcaacgtcggcggcgtggaggaatatgacgaggacgatgagtacgagccagaggacggcgagtactaagcggtgatgtttctgatcagtcgcggccgcgatatcgctagcgaagttcctattctctagaaagtataggaacttcggatcctctagagtcgaaaaaaaaaaagcatgatgcaaaataaaaaactcaccaaggccatggcaccgagcgttggttttcttgtattccccttagtatgcggcgcgcggcgatgtatgaggaaggtcctcctccctcctacgagagtgtggtgagcgcggcgccagtggcggcggcgctgggttctcccttcgatgctcccctggacccgccgtttgtgcctccgcggtacctgcggcctaccggggggagaaacagcatccgttactctgagttggcacccctattcgacaccacccgtgtgtacctggtggacaacaagtcaacggatgtggcatccctgaactaccagaacgaccacagcaactttctgaccacggtcattcaaaacaatgactacagcccgggggaggcaagcacacagaccatcaatcttgacgaccggtcgcactggggcggcgacctgaaaaccatcctgcataccaacatgccaaatgtgaacgagttcatgtttaccaataagtttaaggcgcgggtgatggtgtcgcgcttgcctactaaggacaatcaggtggagctgaaatacgagtgggtggagttcacgctgcccgagggcaactactccgagaccatgaccatagaccttatgaacaacgcgatcgtggagcactacttgaaagtgggcagacagaacggggttctggaaagcgacatcggggtaaagtttgacacccgcaacttcagactggggtttgaccccgtcactggtcttgtcatgcctggggtatatacaaacgaagccttccatccagacatcattttgctgccaggatgcggggtggacttcacccacagccgcctgagcaacttgttgggcatccgcaagcggcaacccttccaggagggctttaggatcacctacgatgatctggagggtggtaacattcccgcactgttggatgtggacgcctaccaggcgagcttgaaagatgacaccgaacagggcgggggtggcgcaggcggcagcaacagcagtggcagcggcgcggaagagaactccaacgcggcagccgcggcaatgcagccggtggaggacatgaacgatcatgccattcgcggcgacacctttgccacacgggctgaggagaagcgcgctgaggccgaagcagcggccgaagctgccgcccccgctgcgcaacccgaggtcgagaagcctcagaagaaaccggtgatcaaacccctgacagaggacagcaagaaacgcagttacaacctaataagcaatgacagcaccttcacccagtaccgcagctggtaccttgcatacaactacggcgaccctcagaccggaatccgctcatggaccctgctttgcactcctgacgtaacctgcggctcggagcaggtctactggtcgttgccagacatgatgcaagaccccgtgaccttccgctccacgcgccagatcagcaactttccggtggtgggcgccgagctgttgcccgtgcactccaagagcttctacaacgaccaggccgtctactcccaactcatccgccagtttacctctctgacccacgtgttcaatcgctttcccgagaaccagattttggcgcgcccgccagcccccaccatcaccaccgtcagtgaaaacgttcctgctctcacagatcacgggacgctaccgctgcgcaacagcatcggaggagtccagcgagtgaccattactgacgccagacgccgcacctgcccctacgtttacaaggccctgggcatagtctcgccgcgcgtcctatcgagccgcactttttgagcaagcatgtccatccttatatcgcccagcaataacacaggctggggcctgcgcttcccaagcaagatgtttggcggggccaagaagcgctccgaccaacacccagtgcgcgtgcgcgggcactaccgcgcgccctggggcgcgcacaaacgcggccgcactgggcgcaccaccgtcgatgacgccatcgacgcggtggtggaggaggcgcgcaactacacgcccacgccgccgccagtgtccaccgtggacgcggccattcagaccgtggtgcgcggagcccggcgctacgctaaaatgaagagacggcggaggcgcgtagcacgtcgccaccgccgccgacccggcactgccgcccaacgcgcggcggcggccctgcttaaccgcgcacgtcgcaccggccgacgggcggccatgcgagccgctcgaaggctggccgcgggtattgtcactgtgccccccaggtccaggcgacgagcggccgccgcagcagccgcggccattagtgttatgactcagggtcgcaggggcaacgtgtactgggtgcgcgactcggttagcggcctgcgcgtgcccgtgcgcacccgccccccgcgcaactagattgcaataaaaaactacttagactcgtactgttgtatgtatccagcggcggcggcgcgcatcgaagctatgtccaagcgcaaaatcaaagaagagatgctccaggtcatcgcgccggagatctatggccccccgaagaaggaagagcaggattacaagccccgaaagctaaagcgggtcaaaaagaaaaagaaagatgatgatgatgatgaacttgacgacgaggtggaactgttgcacgcgaccgcgcccaggcgacgggtacagtggaaaggtcgacgcgtaagacgtgttttgcgacccggcaccaccgtagtctttacgcccggtgagcgctccacccgcacctacaagcgcgtgtatgatgaggtgtacggcgacgaggacctgcttgagcaggccaacgagcgcctcggggagtttgcctacggaaagcggcataaggacatgctggcgttgccgctggacgagggcaacccaacacctagcctaaagcccgtgacactgcagcaggtgctgcccgcgcttgcaccgtccgaagaaaagcgcggcctaaagcgcgagtctggtgacttggcacccaccgtgcagctgatggtacccaagcgtcagcgactggaagatgtcttggaaaaaatgaccgtggagcctgggctggagcccgaggtccgcgtgcggccaatcaagcaggtggcaccgggactgggcgtgcagaccgtggacgttcagatacccaccaccagtagcactagtattgccactgccacagagggcatggagacacaaacgtccccggttgcctcggcggtggcagatgccgcggtgcaggcggccgctgcggccgcgtccaagacctctacggaggtgcaaacggacccgtggatgtttcgtgtttcagccccccggcgtccgcgccgttcaaggaagtacggcgccgccagcgcgctactgcccgaatatgccctacatccttccatcgcgcctacccccggctatcgtggctacacctaccgccccagaagacgagcaactacccgacgccgaaccaccactggaacccgccgccgccgtcgccgtcgccagcccgtgctggccccgatttccgtgcgcagggtggctcgcgaaggaggcaggaccctggtgctgccaacagcgcgctaccaccccagcatcgtttaaaagccggtctttgtggttcttgcagatatggccctcacctgccgcctccgtttcccggtgccgggattccgaggaagaatgcaccgtaggaggggcatggccggccacggcctgacgggcggcatgcgtcgtgcgcaccaccggcggcggcgcgcgtcgcaccgtcgcatgcgcgccggtatcctgcccctccttattccactgatcgccgcggcgattggcgccgtgcccggaattgcatccgtggccttgcaggcgcagagacactgattaaaaacaagttacatgtggaaaaatcaaaataaaagtctggactctcacgctcgcttggtcctgtaactattttgtagaatggaagacatcaactttgcgtcactggccccgcgacacggctcgcgcccgttcatgggaaactggcaagatatcggcaccagcaatatgagcggtggcgccttcagctggggctcgctgtggagcggcattaaaaatttcggttccgccgttaagaactatggcagcaaagcctggaacagcagcacaggccagatgctgagggacaagttgaaagagcaaaatttccaacaaaaggtggtagatggcctggcctctggcattagcggggtggtggacctggccaaccaggcagtgcaaaataagattaacagtaagcttgatccccgccctcccgtagaggagcctccaccggccgtggagacagtgtctccagaggggcgtggcgaaaagcgtccgcgacccgacagggaagaaactctggtgacgcaaatagacgagcctccctcgtacgaggaggcactaaagcaaggcctgcccaccacccgtcccatcgcgcccatggctaccggagtgctgggccagcacacacccgtaacgctggacctgcctccccccgccgacacccagcagaaacctgtgctgccaggcccgtccgccgttgttgtaacccgtcctagccgcgggtccctgcgccgcgccgccagcggtccgcgatcgttgcggcccgtagccagtggcaactggcaaagcacactgaacagcatcgtgggtctgggggtgcaatccctgaagcgccgacgatgcttctgatcgcggccgcgatatcgctagcgaattcgaagttcctattctctagaaagtataggaacttctcgagcacgggatcctctagagtcgatagctaacgtgtcgtatgtgtgtcatgtatgcgtccatgtcgccgccagaggagctgctgagccgccgcgcgcccgctttccaagatggctaccccttcgatgatgccgcagtggtcttacatgcacatctcgggccaggacgcctcggagtacctgagccccgggctggtgcagtttgcccgcgccaccgagacgtacttcagcctgaataacaagtttagaaaccccacggtggcgcctacgcacgacgtgaccacagaccggtcccagcgtttgacgctgcggttcatccctgtggaccgtgaggatactgcgtactcgtacaaggcgcggttcaccctagctgtgggtgataaccgtgtgctggacatggcttccacgtactttgacatccgcggcgtgctggacaggggccctacttttaagccctactctggcactgcctacaacgccctggctcccaagggtgccccaaatccttgcgaatggacatataaagccgatggtgaaactgccacagaaaaaacccacgtatttgggcaggcgccttattctggtataaatattacaaaagatggtattcaacttggaactgacaccgatgatcagccaatctacgcagataaaacatttcaacctgaacctcaaataggagaatctcagtggtacgaaactgaaattaatcatgcagctgggagagtccttaaaaagactaccccaatgaaaccatgttacggttcatatgcaaaacccacaaatgaaaatggagggcaagcaaatgtgaaaacaggaacaggcactactaaagaatatgacatagacatgcaatttttcgacaacagaagtgcggctgctgctggcctagctccagaagtggtattgtacagtgaagatgtagatatagaaaccccagacactcatatttcttacatgcccactattaaggaaggtaactcacgagaactaatgggccaacaatctatgcccaacaggcctaattacattgcttttagggacaattttattggtctaatgtattacaacagcacgggtaatatgggtgttctggcgggccaagcatcgcagttgaatgctgttgtagatttgcaagacagaaacacagagctttcataccagcttttgcttgattccattggtgatagaaccaggtacttttctatgtggaatcaggctgttgacagctatgatccagatgttagaattattgaaaatcatggaactgaagatgaacttccaaattactgctttccactgggaggtgtgattagaacagatacttatcagggaattaaggctaatggaactgatcaaaccacatggaccaaagatgacagtgtcaatgatgctaatgaggaaataagagttggaaataattttgccatggaaatcaatctaaatgccaacctgtggagaaatttcctgtactccaacatagcgctgtatttgcccgacaagctaaagtacagtccttccaacgtaaaaatttctgataacccaaacacctacgactacatgaacaagcgagtggtggctcccgggttagtggactgctacattaaccttggagcacgctggtcccttgactatatggacaacgtcaacccatttaaccaccaccgcaatgctggcctgcgctaccgctcaatgttgctgggcaatggtcgctatgtgcccttccacatccaggtgcctcagaagttctttgccattaaaaacctccttctcctgccgggctcatacacctacgagtggaacttcaggaaggatgttaacatggttctgcagagctctctgggaaacgaccttagagttgacggggctagcattaagtttgacagcatttgtctttacgccaccttcttccccatggcccacaacacggcctccacgctggaagccatgctcagaaatgacaccaacgaccagtcctttaatgactacctttccgccgccaacatgctatatcccatacccgccaacgccaccaacgtgcccatctccatcccatcgcgcaactgggcagcatttcgcggttgggccttcacacgcttgaagacaaaggaaaccccttccctgggatcaggctacgacccttactacacctactctggctccataccataccttgacggaaccttctatcttaatcacacctttaagaaggtggccattacttttgactcttctgttagctggccgggcaacgaccgcctgcttactcccaatgagtttgagattaagcgctcagttgacggggagggctataacgtagctcagtgcaacatgacaaaggactggttcctagtgcagatgttggccaactacaatattggctaccagggcttctacattccagaaagctacaaagaccgcatgtactcgttcttcagaaacttccagcccatgagccggcaagtggtggacgatactaaatacaaagattatcagcaggttggaattatccaccagcataacaactcaggcttcgtaggctacctcgctcccaccatgcgcgagggacaagcttaccccgctaatgttccctacccactaataggcaaaaccgcggttgatagtattacccagaaaaagtttctttgcgaccgcaccctgtggcgcatccccttctccagtaactttatgtccatgggtgcgctcacagacctgggccaaaaccttctctacgcaaactccgcccacgcgctagacatgacctttgaggtggatcccatggacgagcccacccttctttatgttttgtttgaagtctttgacgtggtccgtgtgcaccagccgcaccgcggcgtcatcgagaccgtgtacctgcgcacgcccttctcggccggcaacgccacaacataaagaagcaagcaacatcaacaacagctgccgccatgggctccagtgagcaggaactgaaagccattgtcaaagatcttggttgtgggccatattttttgggcacctatgacaagcgcttcccaggctttgtttccccacacaagctcgcctgcgccatagttaacacggccggtcgcgagactgggggcgtacactggatggcctttgcctggaacccgcgctcaaaaacatgctacctctttgagccctttggcttttctgaccaacgtctcaagcaggtttaccagtttgagtacgagtcactcctgcgccgtagcgccattgcctcttcccccgaccgctgtataacgctggaaaagtccacccaaagcgtgcaggggcccaactcggccgcctgtggcctattctgctgcatgtttctccacgcctttgccaactggccccaaactcccatggatcacaaccccaccatgaaccttattaccggggtacccaactccatgcttaacagtccccaggtacagcccaccctgcgccgcaaccaggaacagctctacagcttcctggagcgccactcgccctacttccgcagccacagtgcgcaaattaggagcgccacttctttttgtcacttgaaaaacatgtaaaaataatgtactaggagacactttcaataaaggcaaatgtttttatttgtacactctcgggtgattatttacccccacccttgccgtctgcgccgtttaaaaatcaaaggggttctgccgcgcatcgctatgcgccactggcagggacacgttgcgatactggtgtttagtgctccacttaaactcaggcacaaccatccgcggcagctcggtgaagttttcactccacaggctgcgcaccatcaccaacgcgtttagcaggtcgggcgccgatatcttgaagtcgcagttggggcctccgccctgcgcgcgcgagttgcgatacacagggttacagcactggaacactatcagcgccgggtggtgcacgctggccagcacgctcttgtcggagatcanatccgcgtccaggtcctccgcgttgctcagggcgaacggagtcaactttggtagctgccttcccaaaaagggtgcatgcccaggctttgagttgcactcgcaccgtagtggcatcagaaggtgaccgtgcccagtctgggcgttaggatacagcgcctgcatgaaagccttgatctgcttaaaagccacctgagcctttgcgccttcagagaagaacatgccgcaagacttgccggaaaactgattggccggacaggccgcgtcatgcacgcagcaccttgcgtcggtgttggagatctgcaccacatttcggccccaccggttcttcacgatcttggccttgctagactgctccttcagcgcgcgctgcccgttttcgctcgtcacatccatttcaatcacgtgctccttatttatcataatgctcccgtgtagacacttaagctcgccttcgatctcagcgcagcggtgcagccacaacgcgcagcccgtgggctcgtggtgcttgtaggttacctctgcaaacgactgcaggtacgcctgcaggaatcgccccatcatcgtcacaaaggtcttgttgctggtgaaggtcagctgcaacccgcggtgctcctcgtttagccaggtcttgcatacggccgccagagcttccacttggtcaggcagtagcttgaagtttgcctttagatcgttatccacgtggtacttgtccatcaacgcgcgcgcagcctccatgcccttctcccacgcagacacgatcggcaggctcagcgggtttatcaccgtgctttcactttccgcttcactggactcttccttttcctcttgcatccgcataccccgcgccactgggtcgtcttcattcagccgccgcaccgtgcgcttacctcccttgccgtgcttgattagcaccggtgggttgctgaaacccaccatttgtagcgccacatcttctctttcttcctcgctgtccacgatcacctctggggatggcgggcgctcgggcttgggagaggggcgcttctttttctttttggacgcaatggccaaatccgccgtcgaggtcgatggccgcgggctgggtgtgcgcggcaccagcgcatcttgtgacgagtcttcttcgtcctcggactcgagacgccgcctcagccgcttttttgggggcgcgcggggaggcggcggcgacggcgacggggacgagacgtcctccatggttggtggacgtcgcgccgcaccgcgtccgcgctcgggggtggtttcgcgctgctcctcttcccgactggccatttccttctcctataggcagaaaaagatcatggagtcagtcgagaaggaggacagcctaaccgccccctttgagttcgccaccaccgcctccaccgatgccgccaacgcgcctaccaccttccccgtcgaggcacccccgcttgaggaggaggaagtgattatcgagcaggacccaggttttgtaagcgaagacgacgaagatcgctcagtaccaacagaggataaaaagcaagaccaggacgacgcagaggcaaacgaggaacaagtcgggcggggggaccaaaggcatggcgactacctagatgtgggagacgacgtgctgttgaagcatctgcagcgccagtgcgccattatctgcgacgcgttgcaagagcgcagcgatgtgcccctcgccatagcggatgtcagccttgcctacgaacgccacctgttctcaccgcgcgtaccccccaaacgccaagaaaacggcacatgcgagcccaacccgcgcctcaacttctaccccgtatttgccgtgccagaggtgcttgccacctatcacatctttttccaaaactgcaagatacccctatcctgccgtgccaaccgcagccgagcggacaagcagctggccttgcggcagggcgctgtcatacctgatatcgcctcgctcgacgaagtgccaaaaatctttgagggtcttggacgcgacgagaagcgcgcggcaaacgctctgcaacaagaaaacagcgaaaatgaaagtcactgtggagtgctggtggaacttgagggtgacaacgcgcgcctagccgtgctgaaacgcagcatcgaggtcacccactttgcctacccggcacttaacctaccccccaaggttatgagcacagtcatgagcgagctgatcgtgcgccgtgcacgacccctggagagggatgcaaacttgcaagaacaaaccgaggagggcctacccgcagttggcgatgagcagctggcgcgctggcttgagacgcgcgagcctgccgacttggaggagcgacgcaagctaatgatggccgcagtgcttgttaccgtggagcttgagtgcatgcagcggttctttgctgacccggagatgcagcgcaagctagaggaaacgttgcactacacctttcgccagggctacgtgcgccaggcctgcaaaatttccaacgtggagctctgcaacctggtctcctaccttggaattttgcacgaaaaccgccttgggcaaaacgtgcttcattccacgctcaagggcgaggcgcgccgcgactacgtccgcgactgcgtttacttatttctgtgctacacctggcaaacggccatgggcgtgtggcagcagtgcctggaggagcgcaacctgaaggagctgcagaagctgctaaagcaaaacttgaaggacctatggacggccttcaacgagcgctccgtggccgcgcacctggcggacattatcttccccgaacgcctgcttaaaaccctgcaacagggtctgccagacttcaccagtcaaagcatgttgcaaaactttaggaactttatcctagagcgttcaggaattctgcccgccacctgctgtgcgcttcctagcgactttgtgcccattaagtaccgtgaatgccctccgccgctttggggtcactgctaccttntgcagctagccaactaccttgcctaccactccgacatcatggaagacgtgagcggtgacggcctactggagtgtcactgtcgctgcaacctatgcaccccgcaccgctccctggtctgcaattcacaactgcttagcgaaagtcaaattatcggtacctttgagctgcagggtccctcgcctgacgaaaagtccgcggctccggggttgaaactcactccggggctgtggacgtcggcttaccttcgcaaatttgtacctgaggactaccacgcccacgagattaggttctacgaagaccaatcccgcccgccaaatgcggagcttaccgcctgcgtcattacccagggccacatccttggccaattgcaagccattaacaaagcccgccaagagtttctgctacgaaagggacggggggtttacttggacccccagtccggcgaggagctcaacccaatccccccgccgccgcagccctatcagcagccgcgggcccttgcttcccaggatggcacccaaaaagaagctgcagctgccgccgccgccacccacggacgaggaggaatactgggacagtcaggcagaggaggttttggacgaggaggaggagatgatggaagactgggacagcctagacgaggaagcttccgaggccgaagaggtgtcagacgaaacaccgtcaccctcggtcgcattcccctcgccggcgccccagaaatcggcaaccgttcccagcattgctacaacctccgctcctcaggcgccgccggcactgcccgttcgccgacccaaccgtagatgggacaccactggaaccagggccggtaagtctaagcagccgccgccgttagcccaagagcaacaacagcgccaaggctaccgctcgtggcgcgtgcacaagaacgccatagttgcttgcttgcaagactgtgggggcaacatctccttcgcccgccgctttcttctctaccatcacggcgtggccttcccccgtaacatcctgcattactaccgtcatctctacagcccctactgcaccggcggcagcggcagcaacagcagcggccacgcagaagcaaaggcgaccggatagcaagactctgacaaagcccaagaaatccacagcggcggcagcagcaggaggaggagcactgcgtctggcgcccaacgaacccgtatcgacccgcgagcttagaaacaggatttttcccactctgtatgctatatttcaacagagcaggggccaagaacaagagctgaaaataaaaaacaggtctctgcgctccctcacccgcagctgcctgtatcacaaaagcgaagatcagcttcggcgcacgctggaagacgcggaggctctcttcagcaaatactgcgcgctgactcttaaggactagtttcgcgccctttctcaaatttaagcgcgaaaactacgtcatctccagcggccacacccggcgccagcacctgtcgtcagcgccattatgagcaaggaaattcccacgccctacatgtggagttaccagccacaaatgggacttgcggctggagctgcccaagactactcaacccgaataaactacatgagcgcgggaccccacatgatatcccgggtcaacggaatccgcgcccaccgaaaccgaattctcctcgaacaggcggctattaccaccacacctcgtaataaccttaatccccgtagttggcccgctgccctggtgtaccaggaaagtcccgctcccaccactgtggtacttcccagagacgcccaggccgaagttcagatgactaactcaggggcgcagcttgcgggcggctttcgtcacagggtgcggtcgcccgggcagggtataactcacctgaaaatcagagggcgaggtattcagctcaacgacgagtcggtgagctcctctcttggtctccgtccggacgggacatttcagatcggcggcgctggccgctcttcatttacgccccgtcaggcgatcctaactctgcagacctcgtcctcggagccgcgctccggaggcattggaactctacaatttattgaggagttcgtgccttcggtttacttcaaccccttttctggacctcccggccactacccggaccagtttattcccaactttgacgcggtaaaagactcggcggacggctacgactgacagatctgagctcgcggccgcgatatcgctagcgaagttcctattctctagaaagtataggaacttcgatcctctagagtcgacctgcaggcatgcaagcttggcactgcaataaattacttacttaaaatcagtcagcaaatctttgtccagcttattcagcatcacctcctttccctcctcccaactctggtatttcagcagccttttagctgcgaactttctccaaagtctaaatgggatgtcaaattcctcatgttcttgtccctccgcacccactatcttcatattgttgcagatgaaacgcgccagaccgtctgaagacaccttcaaccctgtgtacccatatgacacggaaaccggccctccaactgtgcctttccttacccctccctttgtgtcgccaaatgggttccaagaaagtccccccggagtgctttctttgcgtctttcagaacctttggttacctcacacggcatgcttgcgctaaaaatgggcagcggcctgtccctggatcaggcaggcaaccttacatcaaatacaatcactgtttctcaaccgctaaaaaaaacaaagtccaatataactttggaaacatccgcgccccttacagtcagctcaggcgccctaaccatggccacaacttcgcctttggtggtctctgacaacactcttaccatgcaatcacaagcaccgctaaccgtgcaagactcaaaacttagcattgctaccaaagagccacttacagtgttagatggaaaactggccctgcagacatcagcccccctctctgccactgataacaacgccctcactatcactgcctcacctcctcttactactgcaaatggtagtctggctgttaccatggaaaacccactttacaacaacaatggaaaacttgggctcaaaattggcggtcctttgcaagtggccaccgactcacatgcactaacactaggtactggtcagggggttgcagttcataacaatttgctacatacaaaagttacaggcgcaatagggtttgatacatctggcaacatggaacttaaaactggagatggcctctatgtggatagcgccggtcctaaccaaaaactacatattaatctaaataccacaaaaggccttgcttttgacaacaccgcaataacaattaacgctggaaaagggttggaatttgaaacagactcctcaaacggaaatcccataaaaacaaaaattggatcaggcatacaatataataccaatggagctatggttgcaaaacttggaacaggcctcagttttgacagctccggagccataacaatgggcagcataaacaatgacagacttactctttggacaacaccagacccatccccaaattgcagaattgcttcagataaagactgcaagctaactctggcgctaacaaaatgtggcagtcaaattttgggcactgtttcagctttggcagtatcaggtaatatggcctccatcaatggaactctaagcagtgtaaacttggttcttagatttgatgacaacggagtgcttatgtcaaattcatcactggacaaacagtattggaactttagaaacggggactccactaacggtcaaccatacacttatgctgttgggtttatgccaaacctaaaagcttacccaaaaactcaaagtaaaactgcaaaaagtaatattgttagccaggtgtatcttaatggtgacaagtctaaaccattgcattttactattacgctaaatggaacagatgaaaccaaccaagtaagcaaatactcaatatcattcagttggtcctggaacagtggacaatacactaatgacaaatttgccaccaattcctataccttctcctacattgcccaggaataaagaatcgtgaacctgttgcatgttatgtttcaacgtgtttatttttcaattcgtattagtcatcgctattaccatggtgatgcggttttggcagtacatcaatgggcgtggatagcggtttgactcacggggatttccaagtctccaccccattgacgtcaatgggagtttgttttggcaccaaaatcaacgggactttccaaaatgtcgtaacaactccgccccattgacgcaaatgggcggtaggcgtgtacggtgggaggtctatataagcagagctggtttagtgaaccgtcagatccgctagagatccaccatgtttgtctttctcgtgctgctgcccctcgtgagcagccagtgcgtcaatctgacaacaaggacccagctgccccccgcctacaccaactccttcacaagaggcgtgtattaccccgataaggtcttcagatccagcgtcctccacagcacccaagatttgtttctgcctttcttcagcaacgtgacatggttccacgccattcatgtcagcggcacaaacggcacaaagaggtttgacaaccccgtgctccccttcaacgacggcgtgtacttcgccagcacagagaaatccaatatcattaggggctggatcttcggcacaacactggattccaagacccagtctctgctcattgtgaataacgccaccaacgtggtgattaaggtctgtgagtttcagttctgcaacgacccctttctgggagtctactaccacaagaataataagagctggatggagtccgagtttagggtgtacagctccgccaacaactgtaccttcgaatacgtgtcccagcctttcctcatggatctggagggcaagcaaggcaatttcaaaaatctgagagagttcgtgttcaaaaacattgatggatacttcaaaatctacagcaagcatacccccattaatctggtgagggatctgccccaaggattctccgctctggaacctctggtggatctgcccattggcattaacatcacaagattccagaccctcctcgccctccatagatcctatctgacccccggcgactcctccagcggatggacagccggagctgccgcctactacgtgggctatctgcagccaagaacctttctgctgaagtacaacgagaacggcaccatcacagacgctgtcgattgcgctctcgaccctctgagcgagaccaaatgcacactgaagagcttcaccgtggaaaagggcatctatcagaccagcaacttcagagtgcagcctaccgagagcattgtgaggtttcccaacatcaccaatctgtgtcctttcggcgaggtctttaatgccacaaggttcgcttccgtgtatgcttggaataggaagaggatcagcaattgcgtcgccgactattccgtcctctataacagcgcctccttctccaccttcaaatgttatggcgtgtcccccaccaagctcaacgacctctgcttcaccaatgtgtacgctgactccttcgtcattaggggcgacgaggtgaggcaaattgcccccggccagaccggcaagattgctgattacaactacaaactgcccgacgattttaccggctgcgtgatcgcttggaactccaacaatctggactccaaagtgggcggaaactacaattacctctacagactctttagaaaaagcaatctgaagcccttcgagagagacatctccaccgaaatctaccaagccggaagcacaccttgcaatggcgtcgagggatttaactgctacttccctctgcagagctacggctttcaacctaccaacggcgtcggatatcaaccctatagggtggtcgtgctgagctttgaactgctgcatgctcccgccaccgtctgcggacctaagaagagcaccaatctcgtcaaaaacaagtgcgtgaacttcaacttcaatggactgaccggcaccggcgtgctgaccgagagcaataagaagtttctgcccttccagcagttcggaagggatattgccgataccacagatgctgtgagggacccccaaaccctcgagattctggatatcaccccttgcagcttcggaggagtgtccgtgatcacccccggaacaaacacctccaatcaagtggctgtgctgtaccaagacgtgaactgcacagaagtccccgtggccatccatgccgaccagctgacccctacatggagagtgtactccaccggcagcaatgtgttccagacaagagccggatgcctcattggagctgaacacgtcaacaacagctacgagtgcgacattcccatcggcgccggcatttgtgcctcctatcagacccagaccaacagcccaagaagggctagaagcgtcgcttcccaatccatcattgcctacaccatgtctctgggagccgaaaactccgtcgcctactccaacaatagcatcgccatccccaccaattttaccatctccgtgaccacagagattctgcccgtgtccatgacaaagacatccgtggactgcaccatgtacatctgtggcgacagcaccgagtgtagcaatctgctgctgcaatatggcagcttctgcacccagctgaacagagccctcaccggcatcgccgtcgaacaagacaagaacacccaagaggtgttcgcccaagtgaagcaaatctacaagaccccccctatcaaagatttcggaggattcaactttagccagattctgcccgatcctagcaagccttccaagaggagcttcatcgaggatctgctgtttaataaggtgacactggccgacgctggcttcattaaacagtacggcgattgtctgggcgacatcgctgctagggatctgatctgcgctcagaagttcaacggactgacagtcctccctcctctgctgaccgacgagatgatcgctcagtataccagcgctctgctggctggaaccattaccagcggctggacattcggcgctggagccgccctccaaattccctttgccatgcagatggcctatagattcaacggcattggcgtcacccaaaatgtgctgtatgaaaatcagaagctgattgctaaccaattcaatagcgccattggcaagatccaagactctctgagctccacagccagcgccctcggaaagctgcaagacgtggtgaatcaaaacgcccaagctctgaacacactggtgaaacagctcagcagcaactttggagccatcagcagcgtgctcaatgatatcctctctaggctggacaaagtggaggccgaagtccagatcgatagactcatcaccggcagactccaatctctgcagacatacgtcacccaacagctcattagagctgccgaaatcagagcctccgccaatctggccgccaccaagatgtccgagtgcgtgctgggacagagcaagagagtggacttctgtggcaagggataccatctgatgagcttcccccagagcgctccccatggagtggtctttctgcatgtcacatacgtgcccgcccaagagaagaacttcaccaccgctcccgccatttgccacgatggaaaggcccactttcccagagaaggagtgttcgtgagcaacggcacacactggtttgtcacccagagaaatttttacgagccccagattatcaccaccgacaacaccttcgtgtccggaaactgcgatgtcgtgattggcatcgtgaacaacacagtctacgaccctctgcagcccgaactcgacagcttcaaggaagagctggacaagtacttcaagaatcacacatcccccgacgtggatctgggcgacattagcggcattaatgcctccgtcgtcaacattcagaaggagattgatagactgaatgaagtcgccaagaacctcaatgagtctctgattgatctgcaagagctgggcaagtacgagcaatacatcaaatggccttggtacatctggctgggattcatcgctggactcatcgccatcgtgatggtcaccattatgctgtgttgcatgaccagctgctgcagctgtctgaagggctgctgcagctgcggaagctgctgcaagtttgacgaagacgactccgagcccgtgctgaagggcgtcaagctgcattatacataaactagtgctggaattcgcccttatagagtgctggaattcgcccttatagagtgctggaattcgcccttatatctagtaacggccgccagtgtgctggaattcgcccttataacttcgtatagcatacattatacgaagttataagggcgaattctgcagatatccatcctttaaaaaacctcccacacctccccctgaacctgaaacataaaatgaatgcaattgttgttgttaacttgtttattgcagcttataatggttacaaataaagcaatagcatcacaaatttcacaaataaagcatttttttcactgcattctagttgtggtttgtccaaactcatcaatgtatcttaacaacgtgtttatttttcaattgcagaaagaattgcagaaaatttcaagtcatttttcattcagtagtatagccccaccaccacatagcttatactaatcaccgtaccttaatcaaactcacagaaccctagtattcaacctgccacctccctcccaacacacagagtacacagtcctttctccccggctggccttaaacagcatcatatcatgggtaacagacatattcttaggtgttatattccacacggtctcctgtcgagccaaacgctcatcagtgatgttaataaactccccgggcagctcgcttaagttcatgtcgctgtccagctgctgagccacaggctgctgtccaacttgcggttgctcaacgggcggcgaaggagaagtccacgcctacatgggggtagagtcataatcgtgcatcaggatagggcggtggtgctgcagcagcgcgcgaataaactgctgccgccgccgctccgtcctgcaggaatacaacatggcagtggtctcctcagcgatgattcgcaccgcccgcagcataaggcgccttgtcctccgggcacagcagcgcaccctgatctcacttaagtcagcacagtaactgcagcacagtaccacaatattgtttaaaatcccacagtgcaaggcgctgtatccaaagctcatggcggggaccacagaacccacgtggccatcataccacaagcgcaggtagattaagtggcgacccctcataaacacgctggacataaacattacctcttttggcatgttgtaattcaccacctcccggtaccatataaacctctgattaaacatggcgccatccaccaccatcctaaaccagctggccaaaacctgcccgccggctatgcactgcagggaaccgggactggaacaatgacagtggagagcccaggactcgtaaccatggatcatcatgctcgtcatgatatcaatgttggcacaacacaggcacacgtgcatacacttcctcaggattacaagctcctcccgcgtcagaaccatatcccagggaacaacccattcctgaatcagcgtaaatcccacactgcagggaagacctcgcacgtaactcacgttgtgcattgtcaaagtgttacattcgggcagcagcggatgatcctccagtatggtagcgcgtgtctctgtctcaaaaggaggtaggcgatccctactgtacggagtgcgccgagacaaccgagatcgtgttggtcgtagtgtcatgccaaatggaacgccggacgtagtcatatttcctgaagcaaaaccaggtgcgggcgtgacaaacagatctgcgtctccggtctcgtcgcttagctcgctctgtgtagtagttgtagtatatccactctctcaaagcatccaggcgccccctggcttcgggttctatgtaaactccttcatgcgccgctgccctgataacatccaccaccgcagaataagccacacccagccaacctacacattcgttctgcgagtcacacacgggaggagcgggaagagctggaagaaccatgttttttttttttattccaaaagattatccaaaacctcaaaatgaagatctattaagtgaacgcgctcccctccggtggcgtggtcaaactctacagccaaagaacagataatggcatttgtaagatgttgcacaatggcttccaaaaggcaaactgccctcacgtccaagtggacgtaaaggctaaacccttcanggtgaatctcctctataaacattccagcaccttcaaccatgcccaaataattttcatctcgccaccttatcaatatgtctctaagcaaatcccgaatattaagtccggccattgtaaaaatctgctccagagcgccctccaccttcagcctcaagcagcgaatcatgattgcaaaaattcaggttcctcacagacctgtataagattcaaaagcggaacattaacaaaaataccgcgatcccgtaggtcccttcgcagggccagctgaacataatcgtgcaggtctgcacggaccagcgcggccacttccccgccaggaaccatgacaaaagaacccacactgattatgacacgcatactcggagctatgctaaccagcgtagccccgatgtaagcttgttgcatgggcggcgatataaaatgcaaggtactgctcaaaaaatcaggcaaagcctcgcgcaaaaaagcaagcacatcgtagtcatgctcatgcagataaaggcaggtaagttccggaaccaccacagaaaaagacaccatttttctctcaaacatgtctgcgggttcctgcataaacacaaaataaaataacaaaaaaaaaaaaacatttaaacattagaagcctgtcttacaacaggaaaaacaacccttataagcataagacggactacggccatgccggcgtgaccgtaaaaaaactggtcaccgtgattaaaaagcaccaccgacagttcctcggtcatgtccggagtcataatgtaagactcggtaaacacatcaggttggttaacatcggtcagtgctaaaaagcgaccgaaatagcccgggggaatacatacccgcaggcgtagagacaacattacagcccccataggaggtataacaaaattaataggagagaaaaacacataaacccctgaaaaaccctcctgcccctaggcaaaatagcaccctcccgctccagaacaacatacagcgcttccacagcggcagccataacagtcagccttaccagtaaaaaaacctattaaaaaacaccactcgacacggcaccagctcaatcagtcacagtgtaaaaagggccaagtacagagcgagtatatataggactaaaaaatgacgtaacggttaaagtccacaaaaaccacccagaaaaccgcacgcgaacctacgcccagaaacgaaagccaaaaaacccacaacttcctcaaatcttcacttccgttttcccacgatacgtcacttcccattttaaaaaaaaactacaattcccaatacatgcaagttactccgccctaaaacctacgtcacccgccccgttcccacgccccgcgccacgtcacaaactccaccccctcattatcatattggcttcaatccaaaataaggtatattattgatgatggcgat

SEQ ID NO: 39 - DNA, 35720 bp, Artificial
  nucleic acid sequence of SC-Ad-F-C68-(delta)IIIF-(delta)E3-SpikePP-3X-L
  misc_feature (7190)..(7190): n is a, c, g, or t
  misc_feature (21086)..(21086): n is a, c, g, or t
  misc_feature (24022)..(24022): n is a, c, g, or t
  misc_feature (34310)..(34310): n is a, c, g, or t
cgccatcatcaataatataccttattttggattgaagccaatatgataatgagggggtggagtttgtgacgtggcgcggggcgtgggaacggggcgggtgacgtagtagtgtggcggaagtgtgatgttgtaagtgtggcggaacacatgtaagcgccggatgtggtaaaagtgacgtttttggtgtgcgccggtgtacacgggaagtgacaattttcgcgcggttttaggcggatgttgtagtaaatttgggcgtaaccaagtaatatttggccattttcgcgggaaaactgaataagaggaagtgaaatctgaataattctgtgttactcatagcgcgtaatatttgtctagggccgcggggactttgaccgtttacgtggagactcgcccaggtgtttttctcaggtgttttccgcgttccgggtcaaagttggcgttttattattatagtcagctgacgcgcagtgtatttatacccggtgagttcctcaagaggccactcttgagtgccagcgagtagagttttctcctccgagccgctccgacaccgggactgaaaatgagacatattatctgccacggaggtgttattaccgaagaaatggccgccagtcttttggaccagctgatcgaagaggtactggctgataatcttccacctcctagccattttgaaccacctacccttcacgaactgtatgatttagacgtgacggcccccgaagatcccaacgaggaggcggtttcgcagatttttcccgagtctgtaatgttggcggtgcaggaagggattgacttattcacttttccgccggcgcccggttctccggagccgcctcacctttcccggcagcccgagcagccggagcagagagccttgggtccggtttctatgccaaaccttgtgccggaggtgatcgatcttacctgccacgaggctggctttccacccagtgacgacgaggatgaagagggtgaggagtttgtgttagattatgtggagcaccccgggcacggttgcaggtcttgtcattatcaccggaggaatacgggggacccagatattatgtgttcgctttgctatatgaggacctgtggcatgtttgtctacagtaagtgaaaaattatgggcagtgggtgatagagtggtgggtttggtgtggtaattttttttttaatttttacagttttgtggtttaaagaattttgtattgtgattttttaaaaggtcctgtgtctgaacctgagcctgagcccgagccagaaccggagcctgcaagacctacccggcgtcctaaattggtgcctgctatcctgagacgcccgacatcacctgtgtctagagaatgcaatagtagtacggatagctgtgactccggtccttctaacacacctcctgagatacacccggtggtcccgctgtgccccattaaaccagttgccgtgagagttggtgggcgtcgccaggctgtggaatgtatcgaggacttgcttaacgagtctgggcaacctttggacttgagctgtaaacgccccaggccataaggtgtaaacctgtgattgcgtgtgtggttaacgcctttgtttgctgaatgagttgatgtaagtttaataaagggtgagataatgtttaacttgcatggcgtgttaaatggggcggggcttaaagggtatataatgcgccgtgggctaatcttggttacatctgacctcatggaggcttgggagtgtttggaagatttttctgctgtgcgtaacttgctggaacagagctctaacagtacctcttggttttggaggtttctgtggggctcctcccaggcaaagttagtctgcagaattaaggaggattacaagtgggaatttgaagagcttttgaaatcctgtggtgagctgtttgattctttgaatctgggtcaccaggcgcttttccaagagaaggtcatcaagactttggatttttccacaccggggcgcgctgcggctgctgttgcttttttgagttttataaaggataaatggagcgaagaaacccatctgagcggggggtacctgctggattttctggccatgcatctgtggagagcggtggtgagacacaagaatcgcctgctactgttgtcttccgtccgcccggcaataataccgacggaggagcaacagcaggaggaagccaggcggcggcggcggcaggagcagagcccatggaacccgagagccggcctggaccctcgggaatgaatgttgtacaggtggctgaactgtttccagaactgagacgcattttaaccattaacgaggatgggcaggggctaaagggggtaaagagggagcggggggcttctgaggctacagaggaggctaggaatctaacttttagcttaatgaccagacaccgtcctgagtgtgttacttttcagcagattaaggataattgcgctaatgagcttgatctgctggcgcagaagtattccataaagcagctgaccacttactggctgcagccaggggatgattttgaggaggctattagggtatatgcaaaggtggcacttaggccagattgcaagtacaagattagcaaacttgtaaatatcaggaattgttgctacatttctgggaacggggccgaggtggagatagatacggaggatagggtggcctttagatgtagcatgataaatatgtggccgggggtgcttggcatggacggggtggttattatgaatgtgaggtttactggtcccaattttagcggtacggttttcctggccaataccaatcttatcctacacggtgtaagcttctatgggtttaacaatacctgtgtggaagcctggaccgatgtaagggttcggggctgtgccttttactgctgctggaagggggtggtgtgtcgccccaaaagcagggcttcaattaagaaatgcctgtttgaaaggtgtaccttgggtatcctgtctgagggtaactccagggtgcgccacaatgtggcctccgactgtggttgctttatgctagtgaaaagcgtggctgtgattaagcataacatggtgtgtggcaactgcgaggacagggcctctcagatgctgacctgctcggacggcaactgtcacttgctgaagaccattcacgtagccagccactctcgcaaggcctggccagtgtttgagcacaacatactgacccgctgttccttgcatttgggtaacaggaggggggtgttcctaccttaccaatgcaatttgagtcacactaagatattgcttgagcccgagagcatgtccaaggtgaacctgaacggggtgtttgacatgaccatgaagatctggaaggtgctgaggtacgatgagacccgcaccaggtgcagaccctgcgagtgtggcggtaaacatattaggaaccagcctgtgatgctggatgtgaccgaggagctgaggcccgatcacttggtgctggcctgcacccgcgctgagtttggctctagcgatgaagatacagattgaggtactgaaatgtgtgggcgtggcttaagggtgggaaagaatatataaggtgggggtctcatgtagttttgtatctgttttgcagcagccgccgccatgagcgccaactcgtttgatggaagcattgtgagctcatatttgacaacgcgcatgcccccatgggccggggtgcgtcagaatgtgatgggctccagcattgatggtcgccccgtcctgcccgcaaactctactaccttgacctacgagaccgtgtctggaacgccgttggagactgcagcctccgccgccgcttcagccgctgcagccaccgcccgcgggattgtgactgactttgctttcctgagcccgcttgcaagcagtgcagcttcccgttcatccgcccgcgatgacaagttgacggctcttttggcacaattggattctttgacccgggaacttaatgtcgtttctcagcagctgttggatctgcgccagcaggtttctgccctgaaggcttcctcccctcccaatgcggtttaaaacataaataaaaaccagactctgtttggatttggatcaagcaagtgtcttgctgtctttatttaggggttttgcgcgcgcggtaggcccgggaccagcggtctcggtcgttgagggtcctgtgtattttttccaggacgtggtaaaggtgactctggatgttcagatacatgggcataagcccgtctctggggtggaggtagcaccactgcagagcttcatgctgcggggtggtgttgtagatgatccagtcgtagcaggagcgctgggcgtggtgcctaaaaatgtctttcagtagcaagctgattgccaggggcaggcccttggtgtaagtgtttacaaagcggttaagctgggatgggtgcatacgtggggatatgagatgcatcttggactgtatttttaggttggctatgttcccagccatatccctccggggattcatgttgtgcagaaccaccagcacagtgtatccggtgcacttgggaaatttgtcatgtagcttagaaggaaatgcgtggaagaacttggagacgcccttgtgacctccaagattttccatgcattcgtccataatgatggcaatgggcccacgggcggcggcctgggcgaagatatttctgggatcactaacgtcatagttgtgttccaggatgagatcgtcataggccatttttacaaagcgcgggcggagggtgccagactgcggtataatggttccatccggcccaggggcgtagttaccctcacagatttgcatttcccacgctttgagttcagatggggggatcatgtctacctgcggggcgatgaagaaaaccgtttccggggtaggggagatcagctgggaagaaagcaggttcctaagcagctgcgacttaccgcagccggtgggcccgtaaatcacacctattaccggctgcaactggtagttaagagagctgcagctgccgtcatccctgagcaggggggccacttcgttaagcatgtccctgacttgcatgttttccctgaccaaatccgccagaaggcgctcgccgcccagcgatagcagttcttgcaaggaagcaaagtttttcaacggtttgaggccgtccgccgtaggcatgcttttgagcgtttgaccaagcagttccaggcggtcccacagctcggtcacgtgctctacggcatctcgatccagcatatctcctcgtttcgcgggttggggcggctttcgctgtacggcagtagtcggtgctcgtccagacgggccagggtcatgtctttccacgggcgcagggtcctcgtcagcgtagtctgggtcacggtgaaggggtgcgctccgggttgcgcgctggccagggtgcgcttgaggctggtcctgctggtgctgaagcgctgccggtcttcgccctgcgcgtcggccaggtagcatttgaccatggtgtcatagtccagcccctccgcggcgtggcccttggcgcgcagcttgcccttggaggaggcgccgcacgaggggcagtgcagacttttaagggcgtagagcttgggcgcgagaaataccgattccggggagtaggcatccgcgccgcaggccccgcagacggtctcgcattccacgagccaggtgagctctggccgttcggggtcaaaaaccaggtttcccccatgctttttgatgcgtttcttacctctggtttccatgagccggtgtccacgctcggtgacgaaaaggctgtccgtgtccccgtatacagacttgagaggcctgtcctcgagcggtgttccgcggtcctcctcgtatagaaactcggaccactctgagacgaaggctcgcgtccaggccagcacgaaggaggctaagtgggaggggtagcggtcgttgtccactagggggtccactcgctccagggtgtgaagacacatgtcgccctcttcggcatcaaggaaggtgattggtttataggtgtaggccacgtgaccgggtgttcctgaaggggggctataaaagggggtgggggcgcgttcgtcctcactctcttccgcatcgctgtctgcgagggccagctgttggggtgagtactccctctcaaaagcgggcatgacttctgcgctaagattgtcagtttccaaaaacgaggaggatttgatattcacctggcccgcggtgatgcctttgagggtggccgcgtccatctggtcagaaaagacaatctttttgttgtcaagcttggtggcaaacgacccgtagagggcgttggacagcaacttggcgatggagcgcagggtttggtttttgtcgcgatcggcgcgctccttggccgcgatgtttagctgcacgtattcgcgcgcaacgcaccgccattcgggaaagacggtggtgcgctcgtcgggcactaggtgcacgcgccaaccgcggttgtgcagggtgacaaggtcaacgctggtggctacctctccgcgtaggcgctcgttggtccagcagaggcggccgcccttgcgcgagcagaatggcggtagtgggtctagctgcgtctcgtccggggggtctgcgtccacggtaaagaccccgggcagcaggcgcgcgtcgaagtagtctatcttgcatccttgcaagtctagcgcctgctgccatgcgcgggcggcaagcgcgcgctcgtatgggttgagtgggggaccccatggcatggggtgggtgagcgcggaggcgtacatgccgcaaatgtcgtaaacgtagaggggctctctgagtattccaagatatgtagggtagcatcttccaccgcggatgctggcgcgcacgtaatcgtatagttcgtgcgagggagcgaggaggtcgggaccgaggttgctacgggcgggctgctctgctcggaagactatctgcctgaagatggcatgtgagttggatgatatggttggacgctggaagacgttgaagctggcgtctgtgagacctaccgcgtcacgcacgaaggaggcgtaggagtcgcgcagcttgttgaccagctcggcggtgacctgcacgtctagggcgcagtagtccagggtttccttgatgatgtcatacttatcctgtcccttttttttccacagctcgcggttgaggacaaactcttcgcggtctttccagtactcttggatcggaaacccgtcggcctccgaacggtaagagcctancatgtagaactggttgacggcctggtaggcgcagcatcccttttctacgggtagcgcgtatgcctgcgcggccttccggagcgaggtgtgggtgagcgcaaaggtgtccctaaccatgactttgaggtactggtatttgaagtcagtgtcgtcgcatccgccctgctcccagagcaaaaagtccgtgcgctttttggaacgcgggtttggcagggcgaaggtgacatcgttgaagagtatctttcccgcgcgaggcataaagttgcgtgtgatgcggaagggtcccggcacctcggaacggttgttaattacctgggcggcgagcacgatctcgtcaaagccgttgatgttgtggcccacaatgtaaagttccaagaagcgcgggatgcccttgatggaaggcaattttttaagttcctcgtaggtgagctcttcaggggagctgagcccgtgctctgaaagggcccagtctgcaagatgagggttggaagcgacgaatgagctccacaggtcacgggccattagcatttgcaggtggtcgcgaaaggtcctaaactggcgacctatggccattttttctggggtgatgcagtagaaggtaagcgggtcttgttcccagcggtcccatccaaggtccgcggctaggtctcgcgcggcggtcactagaggctcatctccgccgaacttcatgaccagcatgaagggcacgagctgcttcccaaaggcccccatccaagtataggtctctacatcgtaggtgacaaagagacgctcggtgcgaggatgcgagccgatcgggaagaactggatctcccgccaccagttggaggagtggctgttgatgtggtgaaagtagaagtccctgcgacgggccgaacactcgtgctggcttttgtaaaaacgtgcgcagtactggcagcggtgcacgggctgtacatcctgcacgaggttgacctgacgaccgcgcacaaggaagcagagtgggaatttgagcccctcgcctggcgggtttggctggtggtcttctacttcggctgcttgtccttgaccgtctggctgctcgaggggagttacggtggatcggaccaccacgccgcgcgagcccaaagtccagatgtccgcgcgcggcggtcggagcttgatgacaacatcgcgcagatgggagctgtccatggtctggagctcccgcggcgtcaggtcaggcgggagctcctgcaggtttacctcgcatagccgggtcagggcgcgggctaggtccaggtgatacctgatttccaggggctggttggtggcggcgtcgatggcttgcaagaggccgcatccccgcggcgcgactacggtaccgcgcggcgggcggtgggccgcgggggtgtccttggatgatgcatctaaaagcggtgacgcgggcgggcccccggaggtagggggggctcgggacccgccgggagagggggcaggggcacgtcggcgccgcgcgcgggcaggagctggtgctgcgcgcggaggttgctggcgaacgcgacgacgcggcggttgatctcctgaatctggcgcctctgcgtgaagacgacgggcccggtgagcttgaacctgaaagagagttcgacagaatcaatttcggtgtcgttgacggcggcctggcgcaaaatctcctgcacgtctcctgagttgtcttgataggcgatctcggccatgaactgctcgatctcttcctcctggagatctccgcgtccggctcgctccacggtggcggcgaggtcgttggagatgcgggccatgagctgcgagaaggcgttgaggcctccctcgttccagacgcggctgtagaccacgcccccttcggcatcgcgggcgcgcatgaccacctgcgcgagattgagctccacgtgccgggcgaagacggcgtagtttcgcaggcgctgaaagaggtagttgagggtggtggcggtgtgttctgccacgaagaagtacataacccagcgccgcaacgtggattcgttgatatcccccaaggcctcaaggcgctccatggcctcgtagaagtccacggcgaagttgaaaaactgggagttgcgcgccgacacggttaactcctcctccagaagacggatgagctcggcgacagtgtcgcgcacctcgcgctcaaaggctacaggggcctcttcttcttcttcaatctcctcttccataagggcctccccttcttcttcttctggcggcggtgggggaggggggacacggcggcgacgacggcgcaccgggaggcggtcgacaaagcgctcgatcatctccccgcggcgacggcgcatggtctcggtgacggcgcggccgttctcgcgggggcgcagttggaagacgccgcccgtcatgtcccggttatgggttggcggggggctgccgtgcggcagggatacggcgctaacgatgcatctcaacaattgttgtgtaggtactccgccaccgagggacctgagcgagtccgcatcgaccggatcggaaaacctctcgagaaaggcgtctaaccagtcacagtcgcaaggtaggctgagcaccgtggcgggcggcagcgggcggcggtcggggttgtttctggcggaggtgctgctgatgatgtaattaaagtaggcggtcttgagacggcggatggtcgacagaagcaccatgtccttgggtccggcctgctgaatgcgcaggcggtcggccatgccccaggcttcgttttgacatcggcgcaggtctttgtagtagtcttgcatgagcctttctaccggcacttcttcttctccttcctcttgtcctgcatctcttgcatctatcgctgcggcggcggcggagtttggccgtaggtggcgccctcttcctcccatgcgtgtgaccccgaagcccctcatcggctgaagcagggccaggtcggcgacaacgcgctcggctaatatggcctgctgcacctgcgtgagggtagactggaagtcgtccatgtccacaaagcggtggtatgcgcccgtgttgatggtgtaagtgcagttggccataacggaccagttaacggtctggtgacccggctgcgagagctcggtgtacctgagacgcgagtaagcccttgagtcaaagacgtagtcgttgcaagtccgcaccaggtactggtatcccaccaaaaagtgcggcggcggctggcggtagaggggccagcgtagggtggccggggctccgggggcgaggtcttccaacataaggcgatgatatccgtagatgtacctggacatccaggtgatgccggcggcggtggtggaggcgcgcggaaagtcacggacgcggttccagatgttgcgcagcggcaaaaagtgctccatggtcgggacgctctggccggtcaggcgcgcgcagtcgttgacgctctagaccgtgcaaaaggagagcctgtaagcgggcactcttccgtggtctggtggataaattcgcaagggtatcatggcggacgaccggggttcgaaccccggatccggccgtccgccgtgatccatgcggttaccgcccgcgtgtcgaacccaggtgtgcgacgtcagacaacgggggagcgctccttttggcttccttccaggcgcggcggatgctgcgctagcttttttggccactggccgcgcgcggcgtaagcggttaggctggaaagcgaaagcattaagtggctcgctccctgtagccggagggttattttccaagggttgagtcgcgggacccccggttcgagtctcgggccggccggactgcggcgaacgggggtttgcctccccgtcatgcaagaccccgcttgcaaattcctccggaaacagggacgagccccttttttgcttttcccagatgcatccggtgctgcggcagatgcgcccccctcctcagcagcggcaagagcaagagcagcggcagacatgcagggcaccctcccctcctcctaccgcgtcaggaggggcgacatccgcggttgacgcggcagcagatggtgattacgaacccccgcggcgccgggcccggcactacctggacttggaggagggcgagggcctggcgcggctaggagcgccctctcctgagcggtacccaagggtgcagctgaagcgtgatacgcgtgaggcgtacgtgccgcggcagaacctgtttcgcgaccgcgagggagaggagcccgaggagatgcgggatcgaaagttccacgcagggcgcgagctgcggcatggcctgaatcgcgagcggttgctgcgcgaggaggactttgagcccgacgcgcgaaccgggattagtcccgcgcgcgcacacgtggcggccgccgacctggtaaccgcatacgagcagacggtgaaccaggagattaactttcaaaaaagctttaacaaccacgtgcgtacgcttgtggcgcgcgaggaggtggctataggactgatgcatctgtgggactttgtaagcgcgctggagcaaaacccaaatagcaagccgctcatggcgcagctgttccttatagtgcagcacagcagggacaacgaggcattcagggatgcgctgctaaacatagtagagcccgagggccgctggctgctcgatttgataaacatcctgcagagcatagtggtgcaggagcgcagcttgagcctggctgacaaggtggccgccatcaactattccatgcttagcctgggcaagttttacgcccgcaagatataccataccccttacgttcccatagacaaggaggtaaagatcgaggggttctacatgcgcatggcgctgaaggtgcttaccttgagcgacgacctgggcgtttatcgcaacgagcgcatccacaaggccgtgagcgtgagccggcggcgcgagctcagcgaccgcgagctgatgcacagcctgcaaagggccctggctggcacgggcagcggcgatagagaggccgagtcctactttgacgcgggcgctgacctgcgctgggccccaagccgacgcgccctggaggcagctggggccggacctgggctggcggtggcacccgcgcgcgctggcaacgtcggcggcgtggaggaatatgacgaggacgatgagtacgagccagaggacggcgagtactaagcggtgatgtttctgatcagtcgcggccgcgatatcgctagcgaagttcctattctctagaaagtataggaacttcggatcctctagagtcgaaaaaaaaaaagcatgatgcaaaataaaaaactcaccaaggccatggcaccgagcgttggttttcttgtattccccttagtatgcggcgcgcggcgatgtatgaggaaggtcctcctccctcctacgagagtgtggtgagcgcggcgccagtggcggcggcgctgggttctcccttcgatgctcccctggacccgccgtttgtgcctccgcggtacctgcggcctaccggggggagaaacagcatccgttactctgagttggcacccctattcgacaccacccgtgtgtacctggtggacaacaagtcaacggatgtggcatccctgaactaccagaacgaccacagcaactttctgaccacggtcattcaaaacaatgactacagcccgggggaggcaagcacacagaccatcaatcttgacgaccggtcgcactggggcggcgacctgaaaaccatcctgcataccaacatgccaaatgtgaacgagttcatgtttaccaataagtttaaggcgcgggtgatggtgtcgcgcttgcctactaaggacaatcaggtggagctgaaatacgagtgggtggagttcacgctgcccgagggcaactactccgagaccatgaccatagaccttatgaacaacgcgatcgtggagcactacttgaaagtgggcagacagaacggggttctggaaagcgacatcggggtaaagtttgacacccgcaacttcagactggggtttgaccccgtcactggtcttgtcatgcctggggtatatacaaacgaagccttccatccagacatcattttgctgccaggatgcggggtggacttcacccacagccgcctgagcaacttgttgggcatccgcaagcggcaacccttccaggagggctttaggatcacctacgatgatctggagggtggtaacattcccgcactgttggatgtggacgcctaccaggcgagcttgaaagatgacaccgaacagggcgggggtggcgcaggcggcagcaacagcagtggcagcggcgcggaagagaactccaacgcggcagccgcggcaatgcagccggtggaggacatgaacgatcatgccattcgcggcgacacctttgccacacgggctgaggagaagcgcgctgaggccgaagcagcggccgaagctgccgcccccgctgcgcaacccgaggtcgagaagcctcagaagaaaccggtgatcaaacccctgacagaggacagcaagaaacgcagttacaacctaataagcaatgacagcaccttcacccagtaccgcagctggtaccttgcatacaactacggcgaccctcagaccggaatccgctcatggaccctgctttgcactcctgacgtaacctgcggctcggagcaggtctactggtcgttgccagacatgatgcaagaccccgtgaccttccgctccacgcgccagatcagcaactttccggtggtgggcgccgagctgttgcccgtgcactccaagagcttctacaacgaccaggccgtctactcccaactcatccgccagtttacctctctgacccacgtgttcaatcgctttcccgagaaccagattttggcgcgcccgccagcccccaccatcaccaccgtcagtgaaaacgttcctgctctcacagatcacgggacgctaccgctgcgcaacagcatcggaggagtccagcgagtgaccattactgacgccagacgccgcacctgcccctacgtttacaaggccctgggcatagtctcgccgcgcgtcctatcgagccgcactttttgagcaagcatgtccatccttatatcgcccagcaataacacaggctggggcctgcgcttcccaagcaagatgtttggcggggccaagaagcgctccgaccaacacccagtgcgcgtgcgcgggcactaccgcgcgccctggggcgcgcacaaacgcggccgcactgggcgcaccaccgtcgatgacgccatcgacgcggtggtggaggaggcgcgcaactacacgcccacgccgccgccagtgtccaccgtggacgcggccattcagaccgtggtgcgcggagcccggcgctacgctaaaatgaagagacggcggaggcgcgtagcacgtcgccaccgccgccgacccggcactgccgcccaacgcgcggcggcggccctgcttaaccgcgcacgtcgcaccggccgacgggcggccatgcgagccgctcgaaggctggccgcgggtattgtcactgtgccccccaggtccaggcgacgagcggccgccgcagcagccgcggccattagtgttatgactcagggtcgcaggggcaacgtgtactgggtgcgcgactcggttagcggcctgcgcgtgcccgtgcgcacccgccccccgcgcaactagattgcaataaaaaactacttagactcgtactgttgtatgtatccagcggcggcggcgcgcatcgaagctatgtccaagcgcaaaatcaaagaagagatgctccaggtcatcgcgccggagatctatggccccccgaagaaggaagagcaggattacaagccccgaaagctaaagcgggtcaaaaagaaaaagaaagatgatgatgatgatgaacttgacgacgaggtggaactgttgcacgcgaccgcgcccaggcgacgggtacagtggaaaggtcgacgcgtaagacgtgttttgcgacccggcaccaccgtagtctttacgcccggtgagcgctccacccgcacctacaagcgcgtgtatgatgaggtgtacggcgacgaggacctgcttgagcaggccaacgagcgcctcggggagtttgcctacggaaagcggcataaggacatgctggcgttgccgctggacgagggcaacccaacacctagcctaaagcccgtgacactgcagcaggtgctgcccgcgcttgcaccgtccgaagaaaagcgcggcctaaagcgcgagtctggtgacttggcacccaccgtgcagctgatggtacccaagcgtcagcgactggaagatgtcttggaaaaaatgaccgtggagcctgggctggagcccgaggtccgcgtgcggccaatcaagcaggtggcaccgggactgggcgtgcagaccgtggacgttcagatacccaccaccagtagcactagtattgccactgccacagagggcatggagacacaaacgtccccggttgcctcggcggtggcagatgccgcggtgcaggcggccgctgcggccgcgtccaagacctctacggaggtgcaaacggacccgtggatgtttcgtgtttcagccccccggcgtccgcgccgttcaaggaagtacggcgccgccagcgcgctactgcccgaatatgccctacatccttccatcgcgcctacccccggctatcgtggctacacctaccgccccagaagacgagcaactacccgacgccgaaccaccactggaacccgccgccgccgtcgccgtcgccagcccgtgctggccccgatttccgtgcgcagggtggctcgcgaaggaggcaggaccctggtgctgccaacagcgcgctaccaccccagcatcgtttaaaagccggtctttgtggttcttgcagatatggccctcacctgccgcctccgtttcccggtgccgggattccgaggaagaatgcaccgtaggaggggcatggccggccacggcctgacgggcggcatgcgtcgtgcgcaccaccggcggcggcgcgcgtcgcaccgtcgcatgcgcgccggtatcctgcccctccttattccactgatcgccgcggcgattggcgccgtgcccggaattgcatccgtggccttgcaggcgcagagacactgattaaaaacaagttacatgtggaaaaatcaaaataaaagtctggactctcacgctcgcttggtcctgtaactattttgtagaatggaagacatcaactttgcgtcactggccccgcgacacggctcgcgcccgttcatgggaaactggcaagatatcggcaccagcaatatgagcggtggcgccttcagctggggctcgctgtggagcggcattaaaaatttcggttccgccgttaagaactatggcagcaaagcctggaacagcagcacaggccagatgctgagggacaagttgaaagagcaaaatttccaacaaaaggtggtagatggcctggcctctggcattagcggggtggtggacctggccaaccaggcagtgcaaaataagattaacagtaagcttgatccccgccctcccgtagaggagcctccaccggccgtggagacagtgtctccagaggggcgtggcgaaaagcgtccgcgacccgacagggaagaaactctggtgacgcaaatagacgagcctccctcgtacgaggaggcactaaagcaaggcctgcccaccacccgtcccatcgcgcccatggctaccggagtgctgggccagcacacacccgtaacgctggacctgcctccccccgccgacacccagcagaaacctgtgctgccaggcccgtccgccgttgttgtaacccgtcctagccgcgggtccctgcgccgcgccgccagcggtccgcgatcgttgcggcccgtagccagtggcaactggcaaagcacactgaacagcatcgtgggtctgggggtgcaatccctgaagcgccgacgatgcttctgatcgcggccgcgatatcgctagcgaattcgaagttcctattctctagaaagtataggaacttctcgagcacgggatcctctagagtcgatagctaacgtgtcgtatgtgtgtcatgtatgcgtccatgtcgccgccagaggagctgctgagccgccgcgcgcccgctttccaagatggctaccccttcgatgatgccgcagtggtcttacatgcacatctcgggccaggacgcctcggagtacctgagccccgggctggtgcagtttgcccgcgccaccgagacgtacttcagcctgaataacaagtttagaaaccccacggtggcgcctacgcacgacgtgaccacagaccggtcccagcgtttgacgctgcggttcatccctgtggaccgtgaggatactgcgtactcgtacaaggcgcggttcaccctagctgtgggtgataaccgtgtgctggacatggcttccacgtactttgacatccgcggcgtgctggacaggggccctacttttaagccctactctggcactgcctacaacgccctggctcccaagggtgccccaaatccttgcgaatggacatataaagccgatggtgaaactgccacagaaaaaacccacgtatttgggcaggcgccttattctggtataaatattacaaaagatggtattcaacttggaactgacaccgatgatcagccaatctacgcagataaaacatttcaacctgaacctcaaataggagaatctcagtggtacgaaactgaaattaatcatgcagctgggagagtccttaaaaagactaccccaatgaaaccatgttacggttcatatgcaaaacccacaaatgaaaatggagggcaagcaaatgtgaaaacaggaacaggcactactaaagaatatgacatagacatgcaatttttcgacaacagaagtgcggctgctgctggcctagctccagaagtggtattgtacagtgaagatgtagatatagaaaccccagacactcatatttcttacatgcccactattaaggaaggtaactcacgagaactaatgggccaacaatctatgcccaacaggcctaattacattgcttttagggacaattttattggtctaatgtattacaacagcacgggtaatatgggtgttctggcgggccaagcatcgcagttgaatgctgttgtagatttgcaagacagaaacacagagctttcataccagcttttgcttgattccattggtgatagaaccaggtacttttctatgtggaatcaggctgttgacagctatgatccagatgttagaattattgaaaatcatggaactgaagatgaacttccaaattactgctttccactgggaggtgtgattagaacagatacttatcagggaattaaggctaatggaactgatcaaaccacatggaccaaagatgacagtgtcaatgatgctaatgaggaaataagagttggaaataattttgccatggaaatcaatctaaatgccaacctgtggagaaatttcctgtactccaacatagcgctgtatttgcccgacaagctaaagtacagtccttccaacgtaaaaatttctgataacccaaacacctacgactacatgaacaagcgagtggtggctcccgggttagtggactgctacattaaccttggagcacgctggtcccttgactatatggacaacgtcaacccatttaaccaccaccgcaatgctggcctgcgctaccgctcaatgttgctgggcaatggtcgctatgtgcccttccacatccaggtgcctcagaagttctttgccattaaaaacctccttctcctgccgggctcatacacctacgagtggaacttcaggaaggatgttaacatggttctgcagagctctctgggaaacgaccttagagttgacggggctagcattaagtttgacagcatttgtctttacgccaccttcttccccatggcccacaacacggcctccacgctggaagccatgctcagaaatgacaccaacgaccagtcctttaatgactacctttccgccgccaacatgctatatcccatacccgccaacgccaccaacgtgcccatctccatcccatcgcgcaactgggcagcatttcgcggttgggccttcacacgcttgaagacaaaggaaaccccttccctgggatcaggctacgacccttactacacctactctggctccataccataccttgacggaaccttctatcttaatcacacctttaagaaggtggccattacttttgactcttctgttagctggccgggcaacgaccgcctgcttactcccaatgagtttgagattaagcgctcagttgacggggagggctataacgtagctcagtgcaacatgacaaaggactggttcctagtgcagatgttggccaactacaatattggctaccagggcttctacattccagaaagctacaaagaccgcatgtactcgttcttcagaaacttccagcccatgagccggcaagtggtggacgatactaaatacaaagattatcagcaggttggaattatccaccagcataacaactcaggcttcgtaggctacctcgctcccaccatgcgcgagggacaagcttaccccgctaatgttccctacccactaataggcaaaaccgcggttgatagtattacccagaaaaagtttctttgcgaccgcaccctgtggcgcatccccttctccagtaactttatgtccatgggtgcgctcacagacctgggccaaaaccttctctacgcaaactccgcccacgcgctagacatgacctttgaggtggatcccatggacgagcccacccttctttatgttttgtttgaagtctttgacgtggtccgtgtgcaccagccgcaccgcggcgtcatcgagaccgtgtacctgcgcacgcccttctcggccggcaacgccacaacataaagaagcaagcaacatcaacaacagctgccgccatgggctccagtgagcaggaactgaaagccattgtcaaagatcttggttgtgggccatattttttgggcacctatgacaagcgcttcccaggctttgtttccccacacaagctcgcctgcgccatagttaacacggccggtcgcgagactgggggcgtacactggatggcctttgcctggaacccgcgctcaaaaacatgctacctctttgagccctttggcttttctgaccaacgtctcaagcaggtttaccagtttgagtacgagtcactcctgcgccgtagcgccattgcctcttcccccgaccgctgtataacgctggaaaagtccacccaaagcgtgcaggggcccaactcggccgcctgtggcctattctgctgcatgtttctccacgcctttgccaactggccccaaactcccatggatcacaaccccaccatgaaccttattaccggggtacccaactccatgcttaacagtccccaggtacagcccaccctgcgccgcaaccaggaacagctctacagcttcctggagcgccactcgccctacttccgcagccacagtgcgcaaattaggagcgccacttctttttgtcacttgaaaaacatgtaaaaataatgtactaggagacactttcaataaaggcaaatgtttttatttgtacactctcgggtgattatttacccccacccttgccgtctgcgccgtttaaaaatcaaaggggttctgccgcgcatcgctatgcgccactggcagggacacgttgcgatactggtgtttagtgctccacttaaactcaggcacaaccatccgcggcagctcggtgaagttttcactccacaggctgcgcaccatcaccaacgcgtttagcaggtcgggcgccgatatcttgaagtcgcagttggggcctccgccctgcgcgcgcgagttgcgatacacagggttacagcactggaacactatcagcgccgggtggtgcacgctggccagcacgctcttgtcggagatcanatccgcgtccaggtcctccgcgttgctcagggcgaacggagtcaactttggtagctgccttcccaaaaagggtgcatgcccaggctttgagttgcactcgcaccgtagtggcatcagaaggtgaccgtgcccagtctgggcgttaggatacagcgcctgcatgaaagccttgatctgcttaaaagccacctgagcctttgcgccttcagagaagaacatgccgcaagacttgccggaaaactgattggccggacaggccgcgtcatgcacgcagcaccttgcgtcggtgttggagatctgcaccacatttcggccccaccggttcttcacgatcttggccttgctagactgctccttcagcgcgcgctgcccgttttcgctcgtcacatccatttcaatcacgtgctccttatttatcataatgctcccgtgtagacacttaagctcgccttcgatctcagcgcagcggtgcagccacaacgcgcagcccgtgggctcgtggtgcttgtaggttacctctgcaaacgactgcaggtacgcctgcaggaatcgccccatcatcgtcacaaaggtcttgttgctggtgaaggtcagctgcaacccgcggtgctcctcgtttagccaggtcttgcatacggccgccagagcttccacttggtcaggcagtagcttgaagtttgcctttagatcgttatccacgtggtacttgtccatcaacgcgcgcgcagcctccatgcccttctcccacgcagacacgatcggcaggctcagcgggtttatcaccgtgctttcactttccgcttcactggactcttccttttcctcttgcatccgcataccccgcgccactgggtcgtcttcattcagccgccgcaccgtgcgcttacctcccttgccgtgcttgattagcaccggtgggttgctgaaacccaccatttgtagcgccacatcttctctttcttcctcgctgtccacgatcacctctggggatggcgggcgctcgggcttgggagaggggcgcttctttttctttttggacgcaatggccaaatccgccgtcgaggtcgatggccgcgggctgggtgtgcgcggcaccagcgcatcttgtgacgagtcttcttcgtcctcggactcgagacgccgcctcagccgcttttttgggggcgcgcggggaggcggcggcgacggcgacggggacgagacgtcctccatggttggtggacgtcgcgccgcaccgcgtccgcgctcgggggtggtttcgcgctgctcctcttcccgactggccatttccttctcctataggcagaaaaagatcatggagtcagtcgagaaggaggacagcctaaccgccccctttgagttcgccaccaccgcctccaccgatgccgccaacgcgcctaccaccttccccgtcgaggcacccccgcttgaggaggaggaagtgattatcgagcaggacccaggttttgtaagcgaagacgacgaagatcgctcagtaccaacagaggataaaaagcaagaccaggacgacgcagaggcaaacgaggaacaagtcgggcggggggaccaaaggcatggcgactacctagatgtgggagacgacgtgctgttgaagcatctgcagcgccagtgcgccattatctgcgacgcgttgcaagagcgcagcgatgtgcccctcgccatagcggatgtcagccttgcctacgaacgccacctgttctcaccgcgcgtaccccccaaacgccaagaaaacggcacatgcgagcccaacccgcgcctcaacttctaccccgtatttgccgtgccagaggtgcttgccacctatcacatctttttccaaaactgcaagatacccctatcctgccgtgccaaccgcagccgagcggacaagcagctggccttgcggcagggcgctgtcatacctgatatcgcctcgctcgacgaagtgccaaaaatctttgagggtcttggacgcgacgagaagcgcgcggcaaacgctctgcaacaagaaaacagcgaaaatgaaagtcactgtggagtgctggtggaacttgagggtgacaacgcgcgcctagccgtgctgaaacgcagcatcgaggtcacccactttgcctacccggcacttaacctaccccccaaggttatgagcacagtcatgagcgagctgatcgtgcgccgtgcacgacccctggagagggatgcaaacttgcaagaacaaaccgaggagggcctacccgcagttggcgatgagcagctggcgcgctggcttgagacgcgcgagcctgccgacttggaggagcgacgcaagctaatgatggccgcagtgcttgttaccgtggagcttgagtgcatgcagcggttctttgctgacccggagatgcagcgcaagctagaggaaacgttgcactacacctttcgccagggctacgtgcgccaggcctgcaaaatttccaacgtggagctctgcaacctggtctcctaccttggaattttgcacgaaaaccgccttgggcaaaacgtgcttcattccacgctcaagggcgaggcgcgccgcgactacgtccgcgactgcgtttacttatttctgtgctacacctggcaaacggccatgggcgtgtggcagcagtgcctggaggagcgcaacctgaaggagctgcagaagctgctaaagcaaaacttgaaggacctatggacggccttcaacgagcgctccgtggccgcgcacctggcggacattatcttccccgaacgcctgcttaaaaccctgcaacagggtctgccagacttcaccagtcaaagcatgttgcaaaactttaggaactttatcctagagcgttcaggaattctgcccgccacctgctgtgcgcttcctagcgactttgtgcccattaagtaccgtgaatgccctccgccgctttggggtcactgctaccttntgcagctagccaactaccttgcctaccactccgacatcatggaagacgtgagcggtgacggcctactggagtgtcactgtcgctgcaacctatgcaccccgcaccgctccctggtctgcaattcacaactgcttagcgaaagtcaaattatcggtacctttgagctgcagggtccctcgcctgacgaaaagtccgcggctccggggttgaaactcactccggggctgtggacgtcggcttaccttcgcaaatttgtacctgaggactaccacgcccacgagattaggttctacgaagaccaatcccgcccgccaaatgcggagcttaccgcctgcgtcattacccagggccacatccttggccaattgcaagccattaacaaagcccgccaagagtttctgctacgaaagggacggggggtttacttggacccccagtccggcgaggagctcaacccaatccccccgccgccgcagccctatcagcagccgcgggcccttgcttcccaggatggcacccaaaaagaagctgcagctgccgccgccgccacccacggacgaggaggaatactgggacagtcaggcagaggaggttttggacgaggaggaggagatgatggaagactgggacagcctagacgaggaagcttccgaggccgaagaggtgtcagacgaaacaccgtcaccctcggtcgcattcccctcgccggcgccccagaaatcggcaaccgttcccagcattgctacaacctccgctcctcaggcgccgccggcactgcccgttcgccgacccaaccgtagatgggacaccactggaaccagggccggtaagtctaagcagccgccgccgttagcccaagagcaacaacagcgccaaggctaccgctcgtggcgcgtgcacaagaacgccatagttgcttgcttgcaagactgtgggggcaacatctccttcgcccgccgctttcttctctaccatcacggcgtggccttcccccgtaacatcctgcattactaccgtcatctctacagcccctactgcaccggcggcagcggcagcaacagcagcggccacgcagaagcaaaggcgaccggatagcaagactctgacaaagcccaagaaatccacagcggcggcagcagcaggaggaggagcactgcgtctggcgcccaacgaacccgtatcgacccgcgagcttagaaacaggatttttcccactctgtatgctatatttcaacagagcaggggccaagaacaagagctgaaaataaaaaacaggtctctgcgctccctcacccgcagctgcctgtatcacaaaagcgaagatcagcttcggcgcacgctggaagacgcggaggctctcttcagcaaatactgcgcgctgactcttaaggactagtttcgcgccctttctcaaatttaagcgcgaaaactacgtcatctccagcggccacacccggcgccagcacctgtcgtcagcgccattatgagcaaggaaattcccacgccctacatgtggagttaccagccacaaatgggacttgcggctggagctgcccaagactactcaacccgaataaactacatgagcgcgggaccccacatgatatcccgggtcaacggaatccgcgcccaccgaaaccgaattctcctcgaacaggcggctattaccaccacacctcgtaataaccttaatccccgtagttggcccgctgccctggtgtaccaggaaagtcccgctcccaccactgtggtacttcccagagacgcccaggccgaagttcagatgactaactcaggggcgcagcttgcgggcggctttcgtcacagggtgcggtcgcccgggcagggtataactcacctgaaaatcagagggcgaggtattcagctcaacgacgagtcggtgagctcctctcttggtctccgtccggacgggacatttcagatcggcggcgctggccgctcttcatttacgccccgtcaggcgatcctaactctgcagacctcgtcctcggagccgcgctccggaggcattggaactctacaatttattgaggagttcgtgccttcggtttacttcaaccccttttctggacctcccggccactacccggaccagtttattcccaactttgacgcggtaaaagactcggcggacggctacgactgacagatctgagctcgcggccgcgatatcgctagcgaagttcctattctctagaaagtataggaacttcgatcctctagagtcgacctgcaggcatgcaagcttggcactgcaataaattacttacttaaaatcagtcagcaaatctttgtccagcttattcagcatcacctcctttccctcctcccaactctggtatttcagcagccttttagctgcgaactttctccaaagtctaaatgggatgtcaaattcctcatgttcttgtccctccgcacccactatcttcatattgttgcagatgaaacgcgccagaccgtctgaagacaccttcaaccctgtgtacccatatgacacggaaaccggccctccaactgtgcctttccttacccctccctttgtgtcgccaaatgggttccaagaaagtccccccggagtgctttctttgcgtctttcagaacctttggttacctcacacggcatgcttgcgctaaaaatgggcagcggcctgtccctggatcaggcaggcaaccttacatcaaatacaatcactgtttctcaaccgctaaaaaaaacaaagtccaatataactttggaaacatccgcgccccttacagtcagctcaggcgccctaaccatggccacaacttcgcctttggtggtctctgacaacactcttaccatgcaatcacaagcaccgctaaccgtgcaagactcaaaacttagcattgctaccaaagagccacttacagtgttagatggaaaactggccctgcagacatcagcccccctctctgccactgataacaacgccctcactatcactgcctcacctcctcttactactgcaaatggtagtctggctgttaccatggaaaacccactttacaacaacaatggaaaacttgggctcaaaattggcggtcctttgcaagtggccaccgactcacatgcactaacactaggtactggtcagggggttgcagttcataacaatttgctacatacaaaagttacaggcgcaatagggtttgatacatctggcaacatggaacttaaaactggagatggcctctatgtggatagcgccggtcctaaccaaaaactacatattaatctaaataccacaaaaggccttgcttttgacaacaccgcaataacaattaacgctggaaaagggttggaatttgaaacagactcctcaaacggaaatcccataaaaacaaaaattggatcaggcatacaatataataccaatggagctatggttgcaaaacttggaacaggcctcagttttgacagctccggagccataacaatgggcagcataaacaatgacagacttactctttggacaacaccagacccatccccaaattgcagaattgcttcagataaagactgcaagctaactctggcgctaacaaaatgtggcagtcaaattttgggcactgtttcagctttggcagtatcaggtaatatggcctccatcaatggaactctaagcagtgtaaacttggttcttagatttgatgacaacggagtgcttatgtcaaattcatcactggacaaacagtattggaactttagaaacggggactccactaacggtcaaccatacacttatgctgttgggtttatgccaaacctaaaagcttacccaaaaactcaaagtaaaactgcaaaaagtaatattgttagccaggtgtatcttaatggtgacaagtctaaaccattgcattttactattacgctaaatggaacagatgaaaccaaccaagtaagcaaatactcaatatcattcagttggtcctggaacagtggacaatacactaatgacaaatttgccaccaattcctataccttctcctacattgcccaggaataaagaatcgtgaacctgttgcatgttatgtttcaacgtgtttatttttcaattcgtattagtcatcgctattaccatggtgatgcggttttggcagtacatcaatgggcgtggatagcggtttgactcacggggatttccaagtctccaccccattgacgtcaatgggagtttgttttggcaccaaaatcaacgggactttccaaaatgtcgtaacaactccgccccattgacgcaaatgggcggtaggcgtgtacggtgggaggtctatataagcagagctggtttagtgaaccgtcagatccgctagagatccaccatgtttgtctttctcgtgctgctgcccctcgtgagcagccagtgcgtcaatctgacaacaaggacccagctgccccccgcctacaccaactccttcacaagaggcgtgtattaccccgataaggtcttcagatccagcgtcctccacagcacccaagatttgtttctgcctttcttcagcaacgtgacatggttccacgccattcatgtcagcggcacaaacggcacaaagaggtttgacaaccccgtgctccccttcaacgacggcgtgtacttcgccagcacagagaaatccaatatcattaggggctggatcttcggcacaacactggattccaagacccagtctctgctcattgtgaataacgccaccaacgtggtgattaaggtctgtgagtttcagttctgcaacgacccctttctgggagtctactaccacaagaataataagagctggatggagtccgagtttagggtgtacagctccgccaacaactgtaccttcgaatacgtgtcccagcctttcctcatggatctggagggcaagcaaggcaatttcaaaaatctgagagagttcgtgttcaaaaacattgatggatacttcaaaatctacagcaagcatacccccattaatctggtgagggatctgccccaaggattctccgctctggaacctctggtggatctgcccattggcattaacatcacaagattccagaccctcctcgccctccatagatcctatctgacccccggcgactcctccagcggatggacagccggagctgccgcctactacgtgggctatctgcagccaagaacctttctgctgaagtacaacgagaacggcaccatcacagacgctgtcgattgcgctctcgaccctctgagcgagaccaaatgcacactgaagagcttcaccgtggaaaagggcatctatcagaccagcaacttcagagtgcagcctaccgagagcattgtgaggtttcccaacatcaccaatctgtgtcctttcggcgaggtctttaatgccacaaggttcgcttccgtgtatgcttggaataggaagaggatcagcaattgcgtcgccgactattccgtcctctataacagcgcctccttctccaccttcaaatgttatggcgtgtcccccaccaagctcaacgacctctgcttcaccaatgtgtacgctgactccttcgtcattaggggcgacgaggtgaggcaaattgcccccggccagaccggcaagattgctgattacaactacaaactgcccgacgattttaccggctgcgtgatcgcttggaactccaacaatctggactccaaagtgggcggaaactacaattacctctacagactctttagaaaaagcaatctgaagcccttcgagagagacatctccaccgaaatctaccaagccggaagcacaccttgcaatggcgtcgagggatttaactgctacttccctctgcagagctacggctttcaacctaccaacggcgtcggatatcaaccctatagggtggtcgtgctgagctttgaactgctgcatgctcccgccaccgtctgcggacctaagaagagcaccaatctcgtcaaaaacaagtgcgtgaacttcaacttcaatggactgaccggcaccggcgtgctgaccgagagcaataagaagtttctgcccttccagcagttcggaagggatattgccgataccacagatgctgtgagggacccccaaaccctcgagattctggatatcaccccttgcagcttcggaggagtgtccgtgatcacccccggaacaaacacctccaatcaagtggctgtgctgtaccaagacgtgaactgcacagaagtccccgtggccatccatgccgaccagctgacccctacatggagagtgtactccaccggcagcaatgtgttccagacaagagccggatgcctcattggagctgaacacgtcaacaacagctacgagtgcgacattcccatcggcgccggcatttgtgcctcctatcagacccagaccaacagcccaagaagggctagaagcgtcgcttcccaatccatcattgcctacaccatgtctctgggagccgaaaactccgtcgcctactccaacaatagcatcgccatccccaccaattttaccatctccgtgaccacagagattctgcccgtgtccatgacaaagacatccgtggactgcaccatgtacatctgtggcgacagcaccgagtgtagcaatctgctgctgcaatatggcagcttctgcacccagctgaacagagccctcaccggcatcgccgtcgaacaagacaagaacacccaagaggtgttcgcccaagtgaagcaaatctacaagaccccccctatcaaagatttcggaggattcaactttagccagattctgcccgatcctagcaagccttccaagaggagcttcatcgaggatctgctgtttaataaggtgacactggccgacgctggcttcattaaacagtacggcgattgtctgggcgacatcgctgctagggatctgatctgcgctcagaagttcaacggactgacagtcctccctcctctgctgaccgacgagatgatcgctcagtataccagcgctctgctggctggaaccattaccagcggctggacattcggcgctggagccgccctccaaattccctttgccatgcagatggcctatagattcaacggcattggcgtcacccaaaatgtgctgtatgaaaatcagaagctgattgctaaccaattcaatagcgccattggcaagatccaagactctctgagctccacagccagcgccctcggaaagctgcaagacgtggtgaatcaaaacgcccaagctctgaacacactggtgaaacagctcagcagcaactttggagccatcagcagcgtgctcaatgatatcctctctaggctggaccctccggaggccgaagtccagatcgatagactcatcaccggcagactccaatctctgcagacatacgtcacccaacagctcattagagctgccgaaatcagagcctccgccaatctggccgccaccaagatgtccgagtgcgtgctgggacagagcaagagagtggacttctgtggcaagggataccatctgatgagcttcccccagagcgctccccatggagtggtctttctgcatgtcacatacgtgcccgcccaagagaagaacttcaccaccgctcccgccatttgccacgatggaaaggcccactttcccagagaaggagtgttcgtgagcaacggcacacactggtttgtcacccagagaaatttttacgagccccagattatcaccaccgacaacaccttcgtgtccggaaactgcgatgtcgtgattggcatcgtgaacaacacagtctacgaccctctgcagcccgaactcgacagcttcaaggaagagctggacaagtacttcaagaatcacacatcccccgacgtggatctgggcgacattagcggcattaatgcctccgtcgtcaacattcagaaggagattgatagactgaatgaagtcgccaagaacctcaatgagtctctgattgatctgcaagagctgggcaagtacgagcaatacatcaaatggccttggtacatctggctgggattcatcgctggactcatcgccatcgtgatggtcaccattatgctgtgttgcatgaccagctgctgcagctgtctgaagggctgctgcagctgcggaagctgctgcaagtttgacgaagacgactccgagcccgtgctgaagggcgtcaagctgcattatacataaactagtgctggaattcgcccttatagagtgctggaattcgcccttatagagtgctggaattcgcccttatatctagtaacggccgccagtgtgctggaattcgcccttataacttcgtatagcatacattatacgaagttataagggcgaattctgcagatatccatcctttaaaaaacctcccacacctccccctgaacctgaaacataaaatgaatgcaattgttgttgttaacttgtttattgcagcttataatggttacaaataaagcaatagcatcacaaatttcacaaataaagcatttttttcactgcattctagttgtggtttgtccaaactcatcaatgtatcttaacaacgtgtttatttttcaattgcagaaagaattgcagaaaatttcaagtcatttttcattcagtagtatagccccaccaccacatagcttatactaatcaccgtaccttaatcaaactcacagaaccctagtattcaacctgccacctccctcccaacacacagagtacacagtcctttctccccggctggccttaaacagcatcatatcatgggtaacagacatattcttaggtgttatattccacacggtctcctgtcgagccaaacgctcatcagtgatgttaataaactccccgggcagctcgcttaagttcatgtcgctgtccagctgctgagccacaggctgctgtccaacttgcggttgctcaacgggcggcgaaggagaagtccacgcctacatgggggtagagtcataatcgtgcatcaggatagggcggtggtgctgcagcagcgcgcgaataaactgctgccgccgccgctccgtcctgcaggaatacaacatggcagtggtctcctcagcgatgattcgcaccgcccgcagcataaggcgccttgtcctccgggcacagcagcgcaccctgatctcacttaagtcagcacagtaactgcagcacagtaccacaatattgtttaaaatcccacagtgcaaggcgctgtatccaaagctcatggcggggaccacagaacccacgtggccatcataccacaagcgcaggtagattaagtggcgacccctcataaacacgctggacataaacattacctcttttggcatgttgtaattcaccacctcccggtaccatataaacctctgattaaacatggcgccatccaccaccatcctaaaccagctggccaaaacctgcccgccggctatgcactgcagggaaccgggactggaacaatgacagtggagagcccaggactcgtaaccatggatcatcatgctcgtcatgatatcaatgttggcacaacacaggcacacgtgcatacacttcctcaggattacaagctcctcccgcgtcagaaccatatcccagggaacaacccattcctgaatcagcgtaaatcccacactgcagggaagacctcgcacgtaactcacgttgtgcattgtcaaagtgttacattcgggcagcagcggatgatcctccagtatggtagcgcgtgtctctgtctcaaaaggaggtaggcgatccctactgtacggagtgcgccgagacaaccgagatcgtgttggtcgtagtgtcatgccaaatggaacgccggacgtagtcatatttcctgaagcaaaaccaggtgcgggcgtgacaaacagatctgcgtctccggtctcgtcgcttagctcgctctgtgtagtagttgtagtatatccactctctcaaagcatccaggcgccccctggcttcgggttctatgtaaactccttcatgcgccgctgccctgataacatccaccaccgcagaataagccacacccagccaacctacacattcgttctgcgagtcacacacgggaggagcgggaagagctggaagaaccatgttttttttttttattccaaaagattatccaaaacctcaaaatgaagatctattaagtgaacgcgctcccctccggtggcgtggtcaaactctacagccaaagaacagataatggcatttgtaagatgttgcacaatggcttccaaaaggcaaactgccctcacgtccaagtggacgtaaaggctaaacccttcanggtgaatctcctctataaacattccagcaccttcaaccatgcccaaataattttcatctcgccaccttatcaatatgtctctaagcaaatcccgaatattaagtccggccattgtaaaaatctgctccagagcgccctccaccttcagcctcaagcagcgaatcatgattgcaaaaattcaggttcctcacagacctgtataagattcaaaagcggaacattaacaaaaataccgcgatcccgtaggtcccttcgcagggccagctgaacataatcgtgcaggtctgcacggaccagcgcggccacttccccgccaggaaccatgacaaaagaacccacactgattatgacacgcatactcggagctatgctaaccagcgtagccccgatgtaagcttgttgcatgggcggcgatataaaatgcaaggtactgctcaaaaaatcaggcaaagcctcgcgcaaaaaagcaagcacatcgtagtcatgctcatgcagataaaggcaggtaagttccggaaccaccacagaaaaagacaccatttttctctcaaacatgtctgcgggttcctgcataaacacaaaataaaataacaaaaaaaaaaaaacatttaaacattagaagcctgtcttacaacaggaaaaacaacccttataagcataagacggactacggccatgccggcgtgaccgtaaaaaaactggtcaccgtgattaaaaagcaccaccgacagttcctcggtcatgtccggagtcataatgtaagactcggtaaacacatcaggttggttaacatcggtcagtgctaaaaagcgaccgaaatagcccgggggaatacatacccgcaggcgtagagacaacattacagcccccataggaggtataacaaaattaataggagagaaaaacacataaacccctgaaaaaccctcctgcccctaggcaaaatagcaccctcccgctccagaacaacatacagcgcttccacagcggcagccataacagtcagccttaccagtaaaaaaacctattaaaaaacaccactcgacacggcaccagctcaatcagtcacagtgtaaaaagggccaagtacagagcgagtatatataggactaaaaaatgacgtaacggttaaagtccacaaaaaccacccagaaaaccgcacgcgaacctacgcccagaaacgaaagccaaaaaacccacaacttcctcaaatcttcacttccgttttcccacgatacgtcacttcccattttaaaaaaaaactacaattcccaatacatgcaagttactccgccctaaaacctacgtcacccgccccgttcccacgccccgcgccacgtcacaaactccaccccctcattatcatattggcttcaatccaaaataaggtatattattgatgatggcgat

SEQ ID NO: 40 - DNA, 81 bp, Artificial
  AAT secretory sequence
atgccttcatccgtgtcatggggaatcctgctgctggctggactgtgctgtctggtgcctgtctcactggccgaggaccct

SEQ ID NO: 41 - DNA, 30 bp, Artificial
  furin cleavage site
agaggacggagatcaagaggaaggcgcagc

SEQ ID NO: 42 - protein, 1273 aa, Betacoronavirus SARS-CoV-2
MFVFLVLLPLVSSQCVNLTTRTQLPPAYTNSFTRGVYYPDKVFRSSVLHSTQDLFLPFFSNVTWFHAIHVSGTNGTKRFDNPVLPFNDGVYFASTEKSNIIRGWIFGTTLDSKTQSLLIVNNATNVVIKVCEFQFCNDPFLGVYYHKNNKSWMESEFRVYSSANNCTFEYVSQPFLMDLEGKQGNFKNLREFVFKNIDGYFKIYSKHTPINLVRDLPQGFSALEPLVDLPIGINITRFQTLLALHRSYLTPGDSSSGWTAGAAAYYVGYLQPRTFLLKYNENGTITDAVDCALDPLSETKCTLKSFTVEKGIYQTSNFRVQPTESIVRFPNITNLCPFGEVFNATRFASVYAWNRKRISNCVADYSVLYNSASFSTFKCYGVSPTKLNDLCFTNVYADSFVIRGDEVRQIAPGQTGTIADYNYKLPDDFTGCVIAWNSNNLDSKVGGNYNYLFRLFRKSNLKPFERDISTEIYQAGSTPCNGVKGFNCYFPLQSYGFQPTYGVGYQPYRVVVLSFELLHAPATVCGPKKSTNLVKNKCVNFNFNGLTGTGVLTESNKKFLPFQQFGRDIADTTDAVRDPQTLEILDITPCSFGGVSVITPGTNTSNQVAVLYQDVNCTEVPVAIHADQLTPTWRVYSTGSNVFQTRAGCLIGAEHVNNSYECDIPIGAGICASYQTQTNSPQRARSVASQSIIAYTMSLGAENSVAYSNNSIAIPTNFTISVTTEILPVSMTKTSVDCTMYICGDSTECSNLLLQYGSFCTQLNRALTGIAVEQDKNTQEVFAQVKQIYKTPPIKDFGGFNFSQILPDPSKPSKRSFIEDLLFNKVTLADAGFIKQYGDCLGDIAARDLICAQKFNGLTVLPPLLTDEMIAQYTSALLAGTITSGWTFGAGAALQIPFAMQMAYRFNGIGVTQNVLYENQKLIANQFNSAIGKIQDSLSSTASALGKLQDVVNQNAQALNTLVKQLSSNFGAISSVLNDILSRLDPPEAEVQIDRLITGRLQSLQTYVTQQLIRAAEIRASANLAATKMSECVLGQSKRVDFCGKGYHLMSFPQSAPHGVVFLHVTYVPAQEKNFTTAPAICHDGKAHFPREGVFVSNGTHWFVTQRNFYEPQIITTDNTFVSGNCDVVIGIVNNTVYDPLQPELDSFKEELDKYFKNHTSPDVDLGDISGINASVVNIQKEIDRLNEVAKNLNESLIDLQELGKYEQYIKWPWYIWLGFIAGLIAIVMVTIMLCCMTSCCSCLKGCCSCGSCCKFDEDDSEPVLKGVKLHYT

SEQ ID NO: 43 - protein, 1271 aa, Betacoronavirus SARS-CoV-2
MFVFLVLLPLVSSQCVNLRTRTQLPPAYTNSFTRGVYYPDKVFRSSVLHSTQDLFLPFFSNVTWFHAIHVSGTNGTKRFDNPVLPFNDGVYFASTEKSNIIRGWIFGTTLDSKTQSLLIVNNATNVVIKVCEFQFCNDPFLDVYYHKNNKSWMESGVYSSANNCTFEYVSQPFLMDLEGKQGNFKNLREFVFKNIDGYFKIYSKHTPINLVRDLPQGFSALEPLVDLPIGINITRFQTLLALHRSYLTPGDSSSGWTAGAAAYYVGYLQPRTFLLKYNENGTITDAVDCALDPLSETKCTLKSFTVEKGIYQTSNFRVQPTESIVRFPNITNLCPFGEVFNATRFASVYAWNRKRISNCVADYSVLYNSASFSTFKCYGVSPTKLNDLCFTNVYADSFVIRGDEVRQIAPGQTGKIADYNYKLPDDFTGCVIAWNSNNLDSKVGGNYNYRYRLFRKSNLKPFERDISTEIYQAGSKPCNGVEGFNCYFPLQSYGFQPTNGVGYQPYRVVVLSFELLHAPATVCGPKKSTNLVKNKCVNFNFNGLTGTGVLTESNKKFLPFQQFGRDIADTTDAVRDPQTLEILDITPCSFGGVSVITPGTNTSNQVAVLYQGVNCTEVPVAIHADQLTPTWRVYSTGSNVFQTRAGCLIGAEHVNNSYECDIPIGAGICASYQTQTNSRQRARSVASQSIIAYTMSLGAENSVAYSNNSIAIPTNFTISVTTEILPVSMTKTSVDCTMYICGDSTECSNLLLQYGSFCTQLNRALTGIAVEQDKNTQEVFAQVKQIYKTPPIKDFGGFNFSQILPDPSKPSKRSFIEDLLFNKVTLADAGFIKQYGDCLGDIAARDLICAQKFNGLTVLPPLLTDEMIAQYTSALLAGTITSGWTFGAGAALQIPFAMQMAYRFNGIGVTQNVLYENQKLIANQFNSAIGKIQDSLSSTASALGKLQNVVNQNAQALNTLVKQLSSNFGAISSVLNDILSRLDPPEAEVQIDRLITGRLQSLQTYVTQQLIRAAEIRASANLAATKMSECVLGQSKRVDFCGKGYHLMSFPQSAPHGVVFLHVTYVPAQEKNFTTAPAICHDGKAHFPREGVFVSNGTHWFVTQRNFYEPQIITTDNTFVSGNCDVVIGIVNNTVYDPLQPELDSFKEELDKYFKNHTSPDVDLGDISGINASVVNIQKEIDRLNEVAKNLNESLIDLQELGKYEQYIKWPWYIWLGFIAGLIAIVMVTIMLCCMTSCCSCLKGCCSCGSCCKFDEDDSEPVLKGVKLHYT

SEQ ID NO: 44 - protein, 1270 aa, Betacoronavirus SARS-CoV-2
MFVFLVLLPLVSSQCVNLRTRTQLPPAYTNSFTRGVYYPDKVFRSSVLHSTQDLFLPFFSNVTWFHAIHVSGTNGTKRFDNPVLPFNDGVYFASTEKSNIIRGWIFGTTLDSKTQSLLIVNNATNVVIKVCEFQFCNDPFLDVYYHKNNKSWMESGVYSSANNCTFEYVSQPFLMDLEGKQGNFKNLREFVFKNIDGYFKIYSKHTPINLVRDLPQGFSALEPLVDLPIGINITRFQTLLALHRSYLTPGDSSSGWTAGAAAYYVGYLQPRTFLLKYNENGTITDAVDCALDPLSETKCTLKSFTVEKGIYQTSNFRVQPTESIVRFPNITNLCPFGEVFNATRFASVYAWNRKRISNCVADYSVLYNSASFSTFKCYGVSPTKLNDLCFTNVYADSFVIRGDEVRQIAPGQTGIADYNYKLPDDFTGCVIAWNSNNLDSKVGGNYNYRYRLFRKSNLKPFERDISTEIYQAGSKPCNGVEGFNCYFPLQSYGFQPTNGVGYQPYRVVVLSFELLHAPATVCGPKKSTNLVKNKCVNFNFNGLTGTGVLTESNKKFLPFQQFGRDIADTTDAVRDPQTLEILDITPCSFGGVSVITPGTNTSNQVAVLYQGVNCTEVPVAIHADQLTPTWRVYSTGSNVFQTRAGCLIGAEHVNNSYECDIPIGAGICASYQTQTNSRQRARSVASQSIIAYTMSLGAENSVAYSNNSIAIPTNFTISVTTEILPVSMTKTSVDCTMYICGDSTECSNLLLQYGSFCTQLNRALTGIAVEQDKNTQEVFAQVKQIYKTPPIKDFGGFNFSQILPDPSKPSKRSFIEDLLFNKVTLADAGFIKQYGDCLGDIAARDLICAQKFNGLTVLPPLLTDEMIAQYTSALLAGTITSGWTFGAGAALQIPFAMQMAYRFNGIGVTQNVLYENQKLIANQFNSAIGKIQDSLSSTASALGKLQNVVNQNAQALNTLVKQLSSNFGAISSVLNDILSRLDPPEAEVQIDRLITGRLQSLQTYVTQQLIRAAEIRASANLAATKMSECVLGQSKRVDFCGKGYHLMSFPQSAPHGVVFLHVTYVPAQEKNFTTAPAICHDGKAHFPREGVFVSNGTHWFVTQRNFYEPQIITTDNTFVSGNCDVVIGIVNNTVYDPLQPELDSFKEELDKYFKNHTSPDVDLGDISGINASVVNIQKEIDRLNEVAKNLNESLIDLQELGKYEQYIKWPWYIWLGFIAGLIAIVMVTIMLCCMTSCCSCLKGCCSCGSCCKFDEDDSEPVLKGVKLHYT

SEQ ID NO: 45 - protein, 667 aa, amino acid sequence of a M/N fusion polypeptide
MADSNGTITVEELKKLLEQWNLVIGFLFLTWICLLQFAYANRNRFLYIIKLIFLWLLWPVTLACFVLAAVYRINWITGGIAIAMACLVGLMWLSYFIASFRLFARTRSMWSFNPETNILLNVPLHGTILTRPLLESELVIGAVILRGHLRIAGHHLGRCDIKDLPKEITVATSRTLSYYKLGASQRVAGDSGFAAYSRYRIGNYKLNTDHSSSSDNIALLVQRGRRGSGATNFSLLKQAGDVEENPGPMSDNGPQNQRNAPRITFGGPSDSTGSNQNGERSGARSKQRRPQGLPNNTASWFTALTQHGKEDLKFPRGQGVPINTNSSPDDQIGYYRRATRRIRGGDGKMKDLSPRWYFYYLGTGPEAGLPYGANKDGIIWVATEGALNTPKDHIGTRNPANNAAIVLQLPQGTTLPKGFYAEGSRGGSQASSRSSSRSRNSSRNSTPGSSRGTSPARMAGNGGDAALALLLLDRLNQLESKMSGKGQQQQGQTVTKKSAAEASKKPRQKRTATKAYNVTQAFGRRGPEQTQGNFGDQELIRQGTDYKHWPQIAQFAPSASAFFGMSRIGMEVTPSGTWLTYTGAIKLDDKDPNFKDQVILLNKHIDAYKTFPPTEPKKDKKKKADETQALPQRQKKQQTVTLLPAADLDDFSKQLQQSMSSADSTQA

SEQ ID NO: 46 - protein, 1069 aa, artificial
  amino acid sequence of a TcdB/B fusion polypeptide
MPSSVSWGILLLAGLCCLVPVSLAEDPNLITGFTTIGDDKYYFNPDNGGAASVGETIIDGKNYYFSQNGVLQTGVFSTEDGFKYFAPADTLDENLEGEAIDFTGKLTIDENVYYFGDNYRAAIEWQTLDDEVYYFSTDTGRAFKGLNQIGDDKFYFNSDGIMQKGFVNINDKTFYFDDSGVMKSGYTEIDGKYFYFAENGEMQIGVFNTADGFKYFAHHDEDLGNEEGEALSYSGILNFNNKIYYFDDSFTAVVGWKDLEDGSKYYFDEDTAEAYIGISIINDGKYYFNDSGIMQIGFVTINNEVFYFSDSGIVESGMQNIDDNYFYIDENGLVQIGVFDTSDGYKYFAPANTVNDNIYGQAVEYSGLVRVGEDVYYFGETYTIETGWIYDMENESDKYYFDPETKKAYKGINVIDDIKYYFDENGIMRTGLITFEDNHYYFNEDGIMQYGYLNIEDKTFYFSEDGIMQIGVFNTPDGFKYFAHQNTLDENFEGESINYTGWLDLDEKRYYFTDEYIAATGSVIIDGEEYYFDPDTAQLVISERGRRSRGRRSNLITGFVTVGDDKYYFNPINGGAASIGETIIDDKNYYFQQSGVLQTGVFSTEDGFKYFAPANTLDENLEGEAIDFTGKLIIDENIYYFDDNYRGAVEWKELDGEMHYFSPETGKAFKGLNQIGDYKYYFNSDGVMQKGFVSINDNKHYFDDSGVMKVGYTEIDGKHFYFAENGEMQIGVFNTEDGFKYFAHHNEDLGNEEGEEISYSGILNFNNKIYYFDDSFTAVVGWKDLEDGSKYYFDEDTAEAYIGLSLINDGQYYFNDDGIMQVGFVTINDKVFYFSDSGIIESGVQNIDDNYFYIDDNGIVQIGVFDTSDGYKYFAPANTVNDNIYGQAVEYSGLVRVGEDVYYFGETYTIETGWIYDMEQESDKYYFNPETKKACKGINLIDDIKYYFDEKGIMRTGLISFENNNYYFNENGEMQFGYINIEDKMFYFGEDGVMQIGVFNTPDGFKYFAHQNTLDENFEGESIQYTGWLDLDEKRYYFTDEYIAATGSVIIDGEEYYFDPDTAQLVISE

SEQ ID NO: 47 - protein, 1266 aa, Betacoronavirus SARS-CoV-2
MFVFLVLLPLVSSQCVNLTTRTQLPPAYTNSFTRGVYYPDKVFRSSVLHSTQDLFLPFFSNVTWFHAIHVSGTNVIKRFDNPVLPFNDGVYFASTEKSNIIRGWIFGTTLDSKTQSLLIVNNATNVVIKVCEFQFCNDPFLGVYYHKNNKSWMESEFRVYSSANNCTFEYVSQPFLMDLEGKQGNFKNLREFVFKNIDGYFKIYSKHTPINLVRDLPQGFSALEPLVDLPIGINITRFQTLLALHDSSSGWTAGAAAYYVGYLQPRTFLLKYNENGTITDAVDCALDPLSETKCTLKSFTVEKGIYQTSNFRVQPTESIVRFPNITNLCPFGEVFNATRFASVYAWNRKRISNCVADYSVLYNSASFSTFKCYGVSPTKLNDLCFTNVYADSFVIRGDEVRQIAPGQTGKIADYNYKLPDDFTGCVIAWNSNNLDSKVGGNYNYQYRLFRKSNLKPFERDISTEIYQAGSTPCNGVEGFNCYSPLQSYGFQPTNGVGYQPYRVVVLSFELLHAPATVCGPKKSTNLVKNKCVNFNFNGLTGTGVLTESNKKFLPFQQFGRDIADTTDAVRDPQTLEILDITPCSFGGVSVITPGTNTSNQVAVLYQGVNCTEVPVAIHADQLTPTWRVYSTGSNVFQTRAGCLIGAEHVNNSYECDIPIGAGICASYQTQTNSPQRARSVASQSIIAYTMSLGAENSVAYSNNSIAIPTNFTISVTTEILPVSMTKTSVDCTMYICGDSTECSNLLLQYGSFCTQLNRALTGIAVEQDKNTQEVFAQVKQIYKTPPIKDFGGFNFSQILPDPSKPSKRSFIEDLLFNKVTLADAGFIKQYGDCLGDIAARDLICAQKFNGLNVLPPLLTDEMIAQYTSALLAGTITSGWTFGAGAALQIPFAMQMAYRFNGIGVTQNVLYENQKLIANQFNSAIGKIQDSLSSTASALGKLQDVVNQNAQALNTLVKQLSSNFGAISSVLNDILSRLDPPEAEVQIDRLITGRLQSLQTYVTQQLIRAAEIRASANLAATKMSECVLGQSKRVDFCGKGYHLMSFPQSAPHGVVFLHVTYVPAQEKNFTTAPAICHDGKAHFPREGVFVSNGTHWFVTQRNFYEPQIITTDNTFVSGNCDVVIGIVNNTVYDPLQPELDSFKEELDKYFKNHTSPDVDLGDISGINASVVNIQKEIDRLNEVAKNLNESLIDLQELGKYEQYIKWPWYIWLGFIAGLIAIVMVTIMLCCMTSCCSCLKGCCSCGSCCKFDEDDSEPVLKGVKLHYT

SEQ ID NO: 48 - protein, 1273 aa, Betacoronavirus SARS-CoV-2
MFVFLVLLPLVSIQCVNLTTRTQLPPAYTNSFTRGVYYPDKVFRSSVLHSTQDLFLPFFSNVTWFHAIHVSGTNGTKRFDNPVLPFNDGVYFASTEKSNIIRGWIFGTTLDSKTQSLLIVNNATNVVIKVCEFQFCNDPFLGVYYHKNNKSCMESEFRVYSSANNCTFEYVSQPFLMDLEGKQGNFKNLREFVFKNIDGYFKIYSKHTPINLVRDLPQGFSALEPLVDLPIGINITRFQTLLALHRSYLTPGDSSSGWTAGAAAYYVGYLQPRTFLLKYNENGTITDAVDCALDPLSETKCTLKSFTVEKGIYQTSNFRVQPTESIVRFPNITNLCPFGEVFNATRFASVYAWNRKRISNCVADYSVLYNSASFSTFKCYGVSPTKLNDLCFTNVYADSFVIRGDEVRQIAPGQTGKIADYNYKLPDDFTGCVIAWNSNNLDSKVGGNYNYRYRLFRKSNLKPFERDISTEIYQAGSTPCNGVEGFNCYFPLQSYGFQPTNGVGYQPYRVVVLSFELLHAPATVCGPKKSTNLVKNKCVNFNFNGLTGTGVLTESNKKFLPFQQFGRDIADTTDAVRDPQTLEILDITPCSFGGVSVITPGTNTSNQVAVLYQGVNCTEVPVAIHADQLTPTWRVYSTGSNVFQTRAGCLIGAEHVNNSYECDIPIGAGICASYQTQTNSPQRARSVASQSIIAYTMSLGAENSVAYSNNSIAIPTNFTISVTTEILPVSMTKTSVDCTMYICGDSTECSNLLLQYGSFCTQLNRALTGIAVEQDKNTQEVFAQVKQIYKTPPIKDFGGFNFSQILPDPSKPSKRSFIEDLLFNKVTLADAGFIKQYGDCLGDIAARDLICAQKFNGLTVLPPLLTDEMIAQYTSALLAGTITSGWTFGAGAALQIPFAMQMAYRFNGIGVTQNVLYENQKLIANQFNSAIGKIQDSLSSTASALGKLQDVVNQNAQALNTLVKQLSSNFGAISSVLNDILSRLDPPEAEVQIDRLITGRLQSLQTYVTQQLIRAAEIRASANLAATKMSECVLGQSKRVDFCGKGYHLMSFPQSAPHGVVFLHVTYVPAQEKNFTTAPAICHDGKAHFPREGVFVSNGTHWFVTQRNFYEPQIITTDNTFVSGNCDVVIGIVNNTVYDPLQPELDSFKEELDKYFKNHTSPDVDLGDISGINASVVNIQKEIDRLNEVAKNLNESLIDLQELGKYEQYIKWPWYIWLGFIAGLIAIVMVTIMLCCMTSCCSCLKGCCSCGSCCKFDEDDSEPVLKGVKLHYT

What is claimed is:

1. A single-cycle adenovirus (SC-Ad), wherein said SC-Ad comprises a genome lacking at least a portion of a nucleic acid sequence that encodes an adenovirus polypeptide, wherein said SC-Ad comprises said adenovirus polypeptide, and wherein said SC-Ad comprises a nucleic acid sequence encoding a coronavirus immunogen.

2. The SC-Ad of claim 1, wherein said adenovirus polypeptide is selected from the group consisting of a fiber polypeptide, a V polypeptide, a hexon polypeptide, a penton base polypeptide, and a pIIIa polypeptide.

3. The SC-Ad of any one of claims 1-2, wherein said coronavirus immunogen comprises a coronavirus Spike polypeptide or an immunogenic fragment thereof.

4. The SC-Ad of claim 3, wherein said coronavirus immunogen consists of or consists essentially of an amino acid sequence set forth in any one of SEQ ID NOs:1-4.

5. The SC-Ad of any one of claims 1-4, wherein said SC-Ad further comprises a nucleic acid sequence encoding an adjuvant polypeptide.

6. The SC-Ad of claim 5, wherein said adjuvant polypeptide is selected from the group consisting of a granulocyte-macrophage colony-stimulating factor (GM-CSF) polypeptide, an interleukin 4 (IL-4) polypeptide, an interleukin 21 (IL-21) polypeptide, a CD40 ligand (CD40L) polypeptide, a 4-1BB ligand (4-1BBL) polypeptide, a transforming growth factor beta (TGF-β) polypeptide, a Clostridium difficile TcdA polypeptide, a C. difficile TcdB polypeptide, and biologically active fragments thereof.

7. The SC-Ad of claim 5 or claim 6, wherein said coronavirus Spike polypeptide is fused to said adjuvant polypeptide.

8. The SC-Ad of claim 7, wherein said coronavirus Spike polypeptide fused to said adjuvant polypeptide consists essentially of or consists of an amino acid sequence set forth in SEQ ID NO:5.

9. The SC-Ad of any one of claims 1-4, wherein said SC-Ad further comprises a nucleic acid sequence encoding a chaff polypeptide.

10. The SC-Ad of claim 9, wherein said chaff polypeptide is a fragment of an ACE2 polypeptide.

11. The SC-Ad of claim 10, wherein said fragment of an ACE2 polypeptide comprises the extracellular region of an ACE2 polypeptide and lacks a transmembrane domain.

12. The SC-Ad of claim 11, wherein said chaff polypeptide consists essentially of or consists of an amino acid sequence set forth in SEQ ID NO:8 or SEQ ID NO:9.

13. The SC-Ad of any one of claims 9-12, wherein said coronavirus Spike polypeptide is fused to said chaff polypeptide.

14. A composition comprising the SC-Ad of any one of claims 1-13.

15. A method for inducing an immune response against a coronavirus in a mammal, wherein said method comprises administering the SC-Ad of any one of claims 1-13 or the composition of claim 14 to said mammal under conditions wherein said SC-Ad infects a cell of said mammal, and wherein expression of said immunogen in said cell leads to induction of said immune response.

16. The method of claim 15, wherein said mammal is a human.

17. The method of any one of claims 15-16, wherein said coronavirus is a betacoronavirus.

18. The method of claim 17, wherein said betacoronavirus is SARS-CoV-2.

19. The method of any one of claims 15-18, wherein said administering comprising mucosal delivery of said SC-Ad.

20. A SC-Ad, wherein said SC-Ad comprises a genome lacking at least a portion of a nucleic acid sequence that encodes an adenovirus polypeptide, wherein said SC-Ad comprises said adenovirus polypeptide, and wherein said SC-Ad comprises (a) a nucleic acid sequence encoding an immunogen and (b) a nucleic acid sequence encoding an adjuvant polypeptide.

21. The SC-Ad of claim 20, wherein said adenovirus polypeptide is selected from the group consisting of a fiber polypeptide, a V polypeptide, a hexon polypeptide, a penton base polypeptide, and a pIIIa polypeptide.

22. The SC-Ad of any one of claims 20-21, wherein said immunogen is a coronavirus immunogen.

23. The SC-Ad of claim 22, wherein said coronavirus immunogen comprises a coronavirus Spike polypeptide or an immunogenic fragment thereof.

24. The SC-Ad of claim 23, wherein said coronavirus immunogen consists of or consists essentially of an amino acid sequence set forth in any one of SEQ ID NOs:1-4.

25. The SC-Ad of any one of claims 20-24, wherein said adjuvant polypeptide is selected from the group consisting of a GM-CSF polypeptide, an IL-4 polypeptide, an IL-21 polypeptide, a CD40L polypeptide, a 4-1BBL polypeptide, a TGF-β polypeptide, a Clostridium difficile TcdA polypeptide, a C. difficile TcdB polypeptide, and biologically active fragments thereof.

26. The SC-Ad of claim 25, wherein said coronavirus Spike polypeptide is fused to said adjuvant polypeptide.

27. The SC-Ad of claim 26, wherein said coronavirus Spike polypeptide fused to said adjuvant polypeptide consists essentially of or consists of an amino acid sequence set forth in SEQ ID NO:5.

28. The SC-Ad of any one of claims 20-27, wherein said SC-Ad further comprises a nucleic acid sequence encoding a chaff polypeptide.

29. The SC-Ad of claim 28, wherein said chaff polypeptide is a fragment of an ACE2 polypeptide.

30. The SC-Ad of claim 29, wherein said fragment of an ACE2 polypeptide comprises the extracellular region of an ACE2 polypeptide and lacks a transmembrane domain.

31. The SD-Ac of claim 30, wherein said chaff polypeptide consists essentially of or consists of an amino acid sequence set forth in SEQ ID NO:8 or SEQ ID NO:9.

32. A composition comprising the SC-Ad of any one of claims 20-31.

33. A method for inducing an immune response against a virus in a mammal, wherein said method comprises administering the SC-Ad of any one of claims 20-31 or the composition of claim 32 to said mammal under conditions wherein said SC-Ad infects a cell of said mammal, and wherein expression of said immunogen in said cell leads to induction of said immune response.

34. The method of claim 33, wherein said mammal is a human.

35. The method of any one of claims 33-34, wherein said virus is a coronavirus, and wherein said immunogen is associated with said coronavirus.

36. The method of any one of claims 33-35, wherein said coronavirus is a betacoronavirus.

37. The method of claim 36, wherein said betacoronavirus is SARS-CoV-2.

38. The method of any one of claims 33-37, wherein said administering comprising mucosal delivery of said SC-Ad.

39. A SC-Ad, wherein said SC-Ad comprises a genome which lacks at least a portion of a nucleic acid sequence that encodes an adenovirus polypeptide, wherein said SC-Ad comprises said adenovirus polypeptide, and wherein said SC-Ad comprises (a) a nucleic acid sequence encoding an immunogen and (b) a nucleic acid sequence encoding a chaff polypeptide.

40. The SC-Ad of claim 39, wherein said adenovirus polypeptide is selected from the group consisting of a fiber polypeptide, a V polypeptide, a hexon polypeptide, a penton base polypeptide, and a pIIIa polypeptide.

41. The SC-Ad of any one of claims 39-40, wherein said immunogen is a coronavirus immunogen.

42. The SC-Ad of claim 41, wherein said coronavirus immunogen comprises a coronavirus Spike polypeptide or an immunogenic fragment thereof.

43. The SC-Ad of claim 42, wherein said coronavirus immunogen consists of or consists essentially of an amino acid sequence set forth in any one of SEQ ID NOs:1-4.

44. The SC-Ad of claim 43, wherein said chaff polypeptide is a fragment of an ACE2 polypeptide.

45. The SC-Ad of claim 44, wherein said fragment of an ACE2 polypeptide comprises the extracellular region of an ACE2 polypeptide and lacks a transmembrane domain.

46. The SD-Ac of claim 45, wherein said chaff polypeptide consists essentially of or consists of an amino acid sequence set forth in SEQ ID NO:8 or SEQ ID NO:9.

47. The SC-Ad of any one of claims 39-46, wherein said coronavirus Spike polypeptide is fused to said chaff polypeptide.

48. The SC-Ad of any one of claims 39-47, wherein said SC-Ad further comprises a nucleic acid sequence encoding an adjuvant polypeptide.

49. The SC-Ad of claim 48, wherein said adjuvant polypeptide is selected from the group consisting of a GM-CSF polypeptide, an IL-4 polypeptide, an IL-21 polypeptide, a CD40L polypeptide, a 4-1BBL polypeptide, a TGF-β polypeptide, a Clostridium difficile TcdA polypeptide, a C. difficile TcdB polypeptide, and biologically active fragments thereof.

50. A composition comprising the SC-Ad of any one of claims 39-49.

51. A method for inducing an immune response against a virus in a mammal, wherein said method comprises administering the SC-Ad of any one of claims 39-49 or the composition of claim 50 to said mammal under conditions wherein said SC-Ad infects a cell of said mammal, and wherein expression of said immunogen in said cell leads to induction of said immune response.

52. The method of claim 51, wherein said mammal is a human.

53. The method of any one of claims 51-52, wherein said virus is a coronavirus, and wherein said immunogen is associated with said coronavirus.

54. The method of claim 53, wherein said coronavirus is a betacoronavirus.

55. The method of claim 54, wherein said betacoronavirus is SARS-CoV-2.

56. The method of any one of claims 51-55, wherein said administering comprising mucosal delivery of said SC-Ad.
